(19) United States
(12) Patent Application Publication
(10) Pub. No.: US 2005/0136044 A1
(43) Pub. Date: Jun. 23, 2005

(54) Butyrylcholinesterase variants that alter the activity of chemotherapeutic agents

(76) Inventors: Jeffry D. Watkins, Encinitas, CA (US); James D. Pancook, San Diego, CA (US)

Correspondence Address: CATHRYN CAMPBELL;McDERMOTT, WILL & EMERY, Suite 700, 4370 La Jolla Village Drive, San Diego, CA, 92122, US

(21) Appl. No.: 10/728,723

(22) Filed: Dec. 4, 2003

(51) Int. Cl. A61K 38/46; C07H 21/04; C12P 17/18; C12N 9/18

(52) U.S. Cl. 424/94.6; 435/197; 435/119; 514/283; 536/23.2; 424/178.1; 530/388.26

(57) ABSTRACT

The invention provides a butyrylcholinesterase variant having the amino acid sequence selected from SEQ ID NOS: 4, 6, 8, 10, 12, 14, 24, 26, 28, 30, 32, 34, 36, 38, 40, 42, 44, 46, 48, 50, 52, 54, 56, 58, 60, 62, 64, 66, 68, 70, 72, 74, 76, 78, 80, 82, 84, 86, 88, 90, 92, 94, 96, 98, 100, 102, 104, 106, 108, 110, 112, 114, 116, 118, 120, 122, 124, 126, 128, 130, 132, 134, 136, 138, 140, 142, 144, 146, 148, 150, 152, 154, 156, 158, 160, 162, 164, 166, 168, 170, 172, 174, 176, 178, 180, 182, 184, 186, 188, 190, 192, 194, and 196, or functional fragment thereof. In addition, the invention provides a method of converting a camptothecin derivative to a topoisomerase inhibitor by contacting the camptothecin derivative with a butyrylcholinesterase variant selected from SEQ ID NOS: 2, 4, 6, 8, 10, 12, 14, 24, 26, 28, 30, 32, 34, 36, 38, 40, 42, 44, 46, 48, 50, 52, 54, 56, 58, 60, 62, 64, 66, 68, 70, 72, 74, 76, 78, 80, 82, 84, 86, 88, 90, 92, 94, 96, 98, 100, 102, 104, 106, 108, 110, 112, 114, 116, 118, 120, 122, 124, 126, 128, 130, 132, 134, 136, 138, 140, 142, 144, 146, 148, 150, 152, 154, 156, 158, 160, 162, 164, 166, 168, 170, 172, 174, 176, 178, 180, 182, 184, 186, 188, 190, 192, 194, and 196, or functional fragment thereof, under conditions that allow conversion of a camptothecin derivative to a topoisomerase inhibitor. Further, the invention provides a method of treating cancer by administering to an individual an effective amount of a butyrylcholinesterase variant selected from SEQ ID NO: 2, 4, 6, 8, 10, 12, 14, 24, 26, 28, 30, 32, 34, 36, 38, 40, 42, 44, 46, 48, 50, 52, 54, 56, 58, 60, 62, 64, 66, 68, 70, 72, 74, 76, 78, 80, 82, 84, 86, 88, 90, 92, 94, 96, 98, 100, 102, 104, 106, 108, 110, 112, 114, 116, 118, 120, 122, 124, 126, 128, 130, 132, 134, 136, 138, 140, 142, 144, 146, 148, 150, 152, 154, 156, 158, 160, 162, 164, 166, 168, 170, 172, 174, 176, 178, 180, 182, 184, 186, 188, 190, 192, 194, and 196, or functional fragment thereof, exhibiting increased capability to convert a camptothecin derivative to a topoisomerase inhibitor compared to butyrylcholinesterase.

[0001] This application is based on, and claims the benefit of, U.S. Provisional Application No. 60/______ (yet to be assigned), filed Dec. 4, 2002, which was converted from U.S. Ser. No. 10/310,666, and entitled BUTYRYLCHOLINESTERASE VARIANTS THAT ALTER THE ACTIVITY OF CHEMOTHERAPEUTIC AGENTS, and which is incorporated herein by reference.

### BACKGROUND OF THE INVENTION

[0002] This invention relates to butyrylcholinesterase variants and, more specifically to the production and therapeutic use thereof.

[0003] Cancer is one of the leading causes of death in the United States. Each year, more than half a million Americans die from cancer, and more than one million are newly diagnosed with the disease. In cancer, neoplastic cells escape from their normal growth regulatory mechanisms and proliferate in an uncontrolled fashion, leading to the development of a malignant tumor. Tumor cells can metastasize to secondary sites if treatment of the primary tumor is either not complete or not initiated before substantial progression of the disease. Early diagnosis and effective treatment of malignant tumors is therefore essential for survival.

[0004] The current methods for treating cancer include surgery, radiation therapy and chemotherapy. A major problem with each of these treatments is their lack of specificity for cancer cells and numerous side-effects. For instance, due to their toxicity to normal tissues, the amount of radiation or chemotherapeutic agent that can be safely used is often inadequate to kill all neoplastic cells. Even a few residual neoplastic cells can be lethal, as they can rapidly proliferate and metastasize to other sites. Unfortunately, the toxicity associated with radiation and chemotherapy is manifested by unpleasant side effects, including nausea and hair loss, that severely reduce the quality of life for the cancer patient undergoing these treatments. Clearly, a more selective and effective means of treating cancer is needed.

[0005] Recently, classes of chemotherapeutic agents have been discovered which are activated within the body to produce a metabolic product which is toxic to cancer cells. These chemotherapeutic agents are sometimes referred to as “pro-drugs” since they are converted within the body to the active drug. Such chemotherapeutic agents include paxlitaxel prodrug and camptothecin (CPT-11). These agents are metabolized by endogenous carboxylesterases, such as butyrylcholinesterase, to yield active drugs such as paxlitaxel and SN-38, respectively. Unfortunately, although these chemotherapeutic agents have good antitumor activity in vitro, several side effects have been reported with these drugs in patients such as diarrhea, hair loss, nausea, vomiting, and cholinergic symptoms.

[0006] The low therapeutic index of these chemotherapeutic agents limits their use for cancer therapy. Because higher doses of these agents result in more side effects, a different method is needed to make these agents more effective. One method is to increase the efficacy of conversion of these agents within the body into the active drug. A number of naturally occurring human butyrylcholinesterases as well as species variations are known, however none of these enzymes exhibits increased pro-drug hydrolysis activity. In addition, enzymes derived from non-human species and intercellular enzymes have been tested for ability to convert pro-drugs into active drugs. However, both enzymes derived from non-human species and intercellular enzymes can be immunogenic which severely limits their use. Advantageously, human butyrylcholinesterase is located in the plasma and is less immunogenic.

[0007] Thus, there exists a need for butyrylcholinesterase variants capable of altering the activity of chemotherapeutic agents more efficiently than wild-type butyrylcholinesterase. The present invention satisfies this need and provides related advantages as well.

### SUMMARY OF THE INVENTION

[0008] The invention provides a butyrylcholinesterase variant having the amino acid sequence selected from SEQ ID NOS: 4, 6, 8, 10, 12, 14, 24, 26, 28, 30, 32, 34, 36, 38, 40, 42, 44, 46, 48, 50, 52, 54, 56, 58, 60, 62, 64, 66, 68, 70, 72, 74, 76, 78, 80, 82, 84, 86, 88, 90, 92, 94, 96, 98, 100, 102, 104, 106, 108, 110, 112, 114, 116, 118, 120, 122, 124, 126, 128, 130, 132, 134, 136, 138, 140, 142, 144, 146, 148, 150, 152, 154, 156, 158, 160, 162, 164, 166, 168, 170, 172, 174, 176, 178, 180, 182, 184, 186, 188, 190, 192, 194, and 196, or functional fragment thereof.

[0009] In addition, the invention provides a method of converting a camptothecin derivative to a topoisomerase inhibitor by contacting the camptothecin derivative with a butyrylcholinesterase variant selected from SEQ ID NOS: 2, 4, 6, 8, 10, 12, 14, 24, 26, 28, 30, 32, 34, 36, 38, 40, 42, 44, 46, 48, 50, 52, 54, 56, 58, 60, 62, 64, 66, 68, 70, 72, 74, 76, 78, 80, 82, 84, 86, 88, 90, 92, 94, 96, 98, 100, 102, 104, 106, 108, 110, 112, 114, 116, 118, 120, 122, 124, 126, 128, 130, 132, 134, 136, 138, 140, 142, 144, 146, 148, 150, 152, 154, 156, 158, 160, 162, 164, 166, 168, 170, 172, 174, 176, 178, 180, 182, 184, 186, 188, 190, 192, 194, and 196, or functional fragment thereof, under conditions that allow conversion of a camptothecin derivative to a topoisomerase inhibitor.

[0010] Further, the invention provides a method of treating cancer by administering to an individual an effective amount of a butyrylcholinesterase variant selected from SEQ ID NO: 2, 4, 6, 8, 10, 12, 14, 24, 26, 28, 30, 32, 34, 36, 38, 40, 42, 44, 46, 48, 50, 52, 54, 56, 58, 60, 62, 64, 66, 68, 70, 72, 74, 76, 78, 80, 82, 84, 86, 88, 90, 92, 94, 96, 98, 100, 102, 104, 106, 108, 110, 112, 114, 116, 118, 120, 122, 124, 126, 128, 130, 132, 134, 136, 138, 140, 142, 144, 146, 148, 150, 152, 154, 156, 158, 160, 162, 164, 166, 168, 170, 172, 174, 176, 178, 180, 182, 184, 186, 188, 190, 192, 194, and 196, or functional fragment thereof, exhibiting increased capability to convert a camptothecin derivative to a topoisomerase inhibitor compared to butyrylcholinesterase.

### BRIEF DESCRIPTION OF THE DRAWINGS

[0011] FIG. 1 shows a representative o-nitrophenyl acetate assay showing butyrylcholinesterase variants with increased carboxylesterase activity.

[0012] FIG. 2 shows the chemical structure of CPT-11 and SN-38 and the conversion of CPT-11 to SN-38 by carboxylesterase activity.

[0013] FIG. 3 shows a high performance liquid chromatography (HPLC) assay for the formation of SN-38. FIG. 3 shows conditioned media from cells that were mock-transfected. The conditioned media was exposed to CPT-11 and analyzed by HPLC for the formation of SN-38.

[0014] FIG. 4 shows a high performance liquid chromatography (HPLC) assay for the formation of SN-38 using conditioned media from cells that were transfected with the F227A variant. The conditioned media was exposed to CPT-11 and analyzed by HPLC for the formation of SN-38. The CPT-11 and SN-38 peaks are labeled.

[0015] FIG. 5 shows a high performance liquid chromatography (HPLC) assay for the formation of SN-38 using conditioned media from cells that were transfected with the F227A/L286S variant. The conditioned media was exposed to CPT-11 and analyzed by HPLC for the formation of SN-38. The CPT-11 and SN-38 peaks are labeled.

[0016] FIG. 6 shows the results of an MTT cytotoxicity assay. CPT-11 was incubated with wild-type butyrylcholinesterase, the 6-6 variant, or F227A/L286Q variant to activate the CPT-11. The percent of SW38 colon carcinoma cells that were killed when exposed to the activated CPT-11 is shown and compared to CPT-11 that was not incubated with butyrylcholinesterase or a butyrylcholinesterase variant (lanes labeled “mock”).

[0017] FIG. 7 shows an ELISA assay demonstrating binding of expressed anti-EGFR-BChE L530 to anti-kappa capture antibody and measuring activity of bound butyrylcholinesterase by butyrylthiocholine hydrolysis.

[0018] FIG. 8 shows an ELISA assay measuring butyrylcholinesterase enzyme activity of the anti-EGFR-BChE L530 specifically bound to a cell membrane preparation containing the EGFR antigen.

[0019] FIG. 9 shows the nucleotide and amino acid sequence of the mouse anti-EGFR variable light chain (SEQ ID NOS: 17 and 18).

[0020] FIG. 10 shows the nucleotide and amino acid sequence of the mouse anti-EGFR variable heavy chain and constant heavy chain hinge region of L530 (SEQ ID NOS: 19 and 20).

[0021] FIG. 11 shows the nucleotide and amino acid sequence of human butyrylcholinesterase (SEQ ID NOS: 21 and 22). The positions of F227, T284, L286, and S287 are marked in bold and underlined.

[0022] FIG. 12 shows a table that depicts quantitation of SN38 conversion by butyrylcholinesterase variant 4-1.

[0023] FIG. 13 shows a Hofstee plot of CPT-11 hydrolysis by butyrylcholinesterase variant 4-1.

[0024] FIG. 14 shows binding of antibody-butyrylcholinesterase fusion proteins to fixed SKW tumor cells.

[0025] FIG. 15 shows targeted cytotoxocity against SKW tumor cells of an anti-CD20-butyrylcholinesterase fusion protein.

[0026] FIG. 16 shows a table setting forth structural and functional characteristics of the butyrylcholinesterase variant F227A (SEQ ID NO:2).

[0027] FIG. 17 shows a table setting forth structural and functional characteristics of the butyrylcholinesterase variants designated SEQ ID NOS: 24 through 176, all of which are double mutations that include the F227A change as one of the two amino acid changes.

[0028] FIG. 18 shows a table setting forth structural and functional characteristics of the butyrylcholinesterase variants designated SEQ ID NOS: 178 through 196, all of which include the F227A change as one of the amino acid changes.

[0029] FIG. 19 shows the amino acid sequence (SEQ ID NO: 202) and corresponding nucleotide sequence (SEQ ID NO: 201) of an anti-CD20 VH-CH1 hinge cys L530 BChE.4-1 heavy chain construct. This is the fusion protein heavy chain comprised of the anti-CD20 antibody variable heavy chain region with a cysteine-containing hinge region and the L530 fragment (SEQ ID NO: 204) of the butyrylcholinesterase variant designated SEQ ID NO: 180, which incorporates the 4-1 variant amino acids (H77F/F227A/P285N/V331A).

[0030] FIG. 20 shows the amino acid sequence (SEQ ID NO: 198) and corresponding nucleotide sequence (SEQ ID NO: 197) of an anti-CD20 light chain.

### DETAILED DESCRIPTION OF THE INVENTION

[0031] This invention provides butyrylcholinesterase variants that exhibit increased ability to convert chemotherapeutic agent pro-drugs into active drugs. The identification of butyrylcholinesterase variants that exhibit increased ability to convert chemotherapeutic agent pro-drugs into active drugs provides treatment options for cancer.

[0032] In one embodiment, the invention provides a method of treating an individual suffering from symptoms of cancer. The butyrylcholinesterase variants of the invention hold significant clinical value because of their capability to convert pro-drugs to active drugs at a higher rate than any of the known naturally occurring wild-type butyrylcholinesterase. It is this increase in pro-drug conversion activity that enables a more effective treatment for cancer with less side effect which sets the butyrylcholinesterase variants of the invention apart from other treatment options.

[0033] In one embodiment, the invention provides a method of converting a camptothecin derivative to a topoisomerase inhibitor by contacting the camptothecin derivative with a butyrylcholinesterase variant selected from SEQ ID NOS: 2, 4, 6, 8, 10, 12, 14, 24, 26, 28, 30, 32, 34, 36, 38, 40, 42, 44, 46, 48, 50, 52, 54, 56, 58, 60, 62, 64, 66, 68, 70, 72, 74, 76, 78, 80, 82, 84, 86, 88, 90, 92, 94, 96, 98, 100, 102, 104, 106, 108, 110, 112, 114, 116, 118, 120, 122, 124, 126, 128, 130, 132, 134, 136, 138, 140, 142, 144, 146, 148, 150, 152, 154, 156, 158, 160, 162, 164, 166, 168, 170, 172, 174, 176, 178, 180, 182, 184, 186, 188, 190, 192, 194, 196, or functional fragment thereof, under conditions that allow conversion of a camptothecin derivative to a topoisomerase inhibitor.

[0034] As used herein, the term “butyrylcholinesterase” is intended to refer a polypeptide having the sequence of naturally occurring butyrylcholinesterase. A naturally occurring butyrylcholinesterase can be of any species origin, for example, human, primate, horse, or murine. Therefore, a butyrylcholinesterase can be, for example a vertebrate or invertebrate butyrylcholinesterase, for example a mammalian butyrylcholinesterase. In addition, a butyrylcholinesterase of the invention can be a polymorphism or any other allelic variation of a naturally occurring butyrylcholinesterase. A nucleic acid encoding a butyrylcholinesterase of the invention encodes a polypeptide having the sequence of any naturally occurring butyrylcholinesterase. Therefore, a nucleic acid encoding a butyrylcholinesterase can encode a butyrylcholinesterase of any species origin, for example, human, primate, horse, or murine. In addition, a nucleic acid encoding a butyrylcholinesterase encompasses any naturally occurring allele or polymorphism. A GenBank accession number for human butyrylcholinesterase is M16541.

[0035] As used herein, the term “butyrylcholinesterase variant” is intended to refer to a molecule that is structurally similar to butyrylcholinesterase, but differs by at least one amino acid from butyrylcholinesterase. A butyrylcholinesterase variant has the amino acid sequence as butyrylcholinesterase and exhibits enhanced metabolic capability to convert a camptothecin derivative to a topoisomerase inhibitor. In this regard, a butyrylcholinesterase variant can possess, for example, reduced, the or increased capability to convert a camptothecin derivative to a topoisomerase inhibitor compared to butyrylcholinesterase. For example, the conversion capability of a butyrylcholinesterase variant of the invention can be increased by a factor of 2, 5, 10, 50, 100, 200, 300, 400, 500, 600, 700, 800, 900, 1000, 1100, 1200, 1300, 1400, 1500, 1600, 1700, 1800, 1900, 2000, 2100, 2200, 2300, 2400, 2500, 2600, 2700, 2800, 2900, 3000, 4000, 5000, or more.

[0036] A butyrylcholinesterase variant can have a single amino acid alteration as well as multiple amino acid alterations compared to buyrylcholinesterase. A specific example of a butyrylcholinesterase variant is butyrylcholinesterase having the amino acid alanine at position 227, of which the amino acid sequence and encoding nucleic acid sequence is designated as SEQ ID NOS: 2 and 1, respectively. A further example is the butyrylcholinesterase variant the amino acid Phenylalanine at position 77, the amino acid alanine at position 227, the amino acid Asparagine at position 285, the amino acid alanine at position 331, of which the amino acid sequence and encoding nucleic acid sequence is designated as SEQ ID NOS: 180 and 179, respectively, and which exhibits at least a three thousand-fold increased capability to convert the camptothecin derivative CPT-11 to the topoisomerase inhibitor SN-38 compared to butyrylcholinesterase. The term is also intended to include butyrylcholinesterase variants encompassing, for example, modified forms of naturally occurring amino acids such as D-stereoisomers, non-naturally occurring amino acids, amino acid analogues and mimetics so long as such variants have substantially the same amino acid sequence as butyrylcholinesterase and exhibit capability to convert a camptothecin derivative to a topoisomerase inhibitor. A butyrylcholinesterase variant of the invention can have one or amino acid alterations outside of the regions determined or predicted to be important for conversion capability of a camptothecin derviative to a topoisomerase inhibitor herein. Furthermore, a butyrylcholinesterase variant of the invention can have one or more additional modifications that do not significantly change its capability to convert a camptothecin derivative to a topoisomerase inhibitor activity. A butyrylcholinesterase variant of the invention can also have increased stability compared to butyrylcholinesterase.

[0037] As used herein, the butyrylcolinesterase variants of the invention include sequences that are substantially the same as the reference amino acid sequence and a butyrylcholinesterase variant is thus intended to include a polypeptide, fragment or segment having an identical amino acid sequence, or a polypeptide, fragment or segment having a similar, non-identical sequence that is considered by those skilled in the art to be a functionally equivalent amino acid sequence. An amino acid sequence that is substantially identical to a reference butyrylcholinesterase or butyrylcholinesterase variant of the invention can have at least 70%, at least 80%, at least 81%, at least 83%, at least 85%, at least 90%, at least 95% or more identity to the reference butyrylcholinesterase. Substantially the same amino acid sequence is also intended to include polypeptides encompassing, for example, modified forms of naturally occurring amino acids such as D-stereoisomers, non-naturally occurring amino acids, amino acid analogues and mimetics so long as such polypeptides retain functional activity as defined above. A biological activity of a butyrylcholinesterase variant of the invention is the capability to convert a camptothecin derivative to a topoisomerase inhibitor, as described herein. For example, the butyrylcholinesterase variant F227A designated SEQ ID NO: 2 exhibits at least a three-fold increased capability to convert the camptothecin derivative CPT-11 to the topoisomerase inhibitor SN-38 compared to butyrylcholinesterase. A further example is the butyrylcholinesterase variant H77F, F227A, P285N, V331A designated SEQ ID NO: 180, which exhibits at least a three thousand-fold increased capability to convert the camptothecin derivative CPT-11 to the topoisomerase inhibitor SN-38 compared to butyrylcholinesterase.

[0038] It is understood that minor modifications in the primary amino acid sequence can result in a polypeptide that has a substantially equivalent function as compared to a polypeptide of the invention. These modifications can be deliberate, as through site-directed mutagenesis, or may be accidental such as through spontaneous mutation. For example, it is understood that only a portion of the entire primary structure of a butyrylcholinesterase variant can be required in order to effect the capability to convert a camptothecin derivative to a topoisomerase inhibitor. Moreover, fragments of the sequence of a butyrylcholinesterase variant of the invention are similarly included within the definition as long as at least one biological function of the butyrylcholinesterase variant is retained. It is understood that various molecules can be attached to a polypeptide of the invention, for example, other polypeptides, carbohydrates, lipids, or chemical moieties.

[0039] The nucleic acid molecules of the invention include nucleic acid sequences that are substantially the same to the reference nucleic acid molecule of the invention or a fragment thereof and are intended to include sequences having one or more additions, deletions or substitutions with respect to the reference sequence, so long as the nucleic acid molecule retains its ability to selectively hybridize with the subject nucleic acid molecule under moderately stringent conditions, or highly stringent conditions. Moderately stringent conditions are intended to include hybridization conditions equivalent to hybridization of filter-bound nucleic acid in 50% formamide, 5× Denhart's solution, 5×SSPE, 0.2% SDS at 42° C., followed by washing in 0.2×SSPE, 0.2% SDS, at 50°. As used herein, highly stringent conditions are conditions equivalent to hybridization of filter-bound nucleic acid in 50% formamide, 5× Denhart's solution, 5×SSPE, 0.2% SDS at 42° C., followed by washing in 0.2×SSPE, 0.2% SDS, at 65°. Other suitable moderately stringent and highly stringent hybridization buffers and conditions are well known to those of skill in the art and are described, for example, in Sambrook et al., Molecular Cloning: A Laboratory Manual, Cold Spring Harbor Laboratory, New York (1992) and in Ansubel et al., Current Protocols in Molecular Biology, John Wiley and Sons, Baltimore, Md. (1998). Thus, it is not necessary that two nucleic acids exhibit sequence identity to be substantially complimentary, only that they can specifically hybridize or be made to specifically hybridize without detectible cross reactivity with other similar sequences.

[0040] In general, a nucleic acid molecule that has substantially the same nucleotide sequence as a reference sequence will have greater than about 60% identity, such as greater than about 65%, 70%, 75% identity with the reference sequence, such as greater than about 80%, 85%, 90%, 95%, 97% or 99% identity to the reference sequence over the length of the two sequences being compared. Identity of any two nucleic acid sequences can be determined by those skilled in the art based, for example, on a BLAST 2.0 computer alignment, using default parameters. BLAST 2.0 searching is available at ncbi.nlm.nih.gov/gorf/bl2.html., as described by Tatiana et al., FEMS Microbiol Lett. 174: 247-250 (1999).

[0041] As used herein, the term “fragment” when used in reference to a nucleic acid encoding the claimed polypeptides is intended to mean a nucleic acid having substantially the same sequence as a portion of a nucleic acid encoding a polypeptide of the invention or segments thereof. The nucleic acid fragment is sufficient in length and sequence to selectively hybridize to a butyrylcholinesterase variant encoding nucleic acid or a nucleotide sequence that is complimentary to a butyrylcholinesterase variant encoding nucleic acid. Therefore, fragment is intended to include primers for sequencing and polymerase chain reaction (PCR) as well as probes for nucleic acid blot or solution hybridization.

[0042] Similarly, the term “functional fragment” when used in reference to a nucleic acid encoding a butyrylcholinesterase or butyrylcholinesterase variant is intended to refer to a portion of the nucleic acid that encodes a portion of the butyrylcholinesterase or butyrylcholinesterase variant that still retains some or all of the metabolic conversion capability of the parent polypeptide. A functional fragment of a polypeptide of the invention exhibiting a functional activity can have, for example, at least 6 contiguous amino acid residues from the polypeptide, at least 8, 10, 15, 20, 30 or 40 amino acids, and often has at least 50, 75, 100, 200, 300, 400 or more amino acids of a polypeptide of the invention, up to the full length polypeptide minus one amino acid. An example of a functional fragment of a butyrylcholinesterase variant of the invention is a variant that is truncated at position 530, which is a Leucine residue in the wild-type butytlcholinesterase. While a L530 truncation has no effect on the functional activity of the corresponding full-length variant, the truncation prevents formation of tetramers, thereby enhancing bioactivity and pharmacokinetic properties of the variant. Therefore, a butyrylcholinestrase variant of the invention includes an L530 truncation, which is considered a functional fragment of the reference variant.

[0043] As used herein, the term “functional fragment” in regard to a polypeptide of the invention, refers to a portion of the reference polypeptide that is capable of exhibiting or carrying out a functional activity of the reference polypeptide. A functional fragment of a polypeptide of the invention exhibiting a functional activity can have, for example, at least 6 contiguous amino acid residues from the polypeptide, at least 8, 10, 15, 20, 30 or 40 amino acids, and often has at least 50, 75, 100, 200, 300, 400 or more amino acids of a polypeptide of the invention, up to the full length polypeptide minus one amino acid. The appropriate length and amino acid sequence of a functional fragment of a polypeptide of the invention can be determined by those skilled in the art, depending on the intended use of the functional fragment. For example, a functional fragment of a butyrylcholinesterase or butyrylcholinesterase variant is intended to refer to a portion of the butyrylcholinesterase or butyrylcholinesterase variant that still retains some or all of the metabolic conversion capability of the parent polypeptide.

[0044] As used herein, the term “antibody” is intended to mean a polypeptide produced in response to an antigen which has the ability to specifically bind to the antigen which induced its formation. Antibodies include, for example, monoclonal and polyclonal antibodies, single chain antibodies, chimeric antibodies, bifunctional or bispecific antibodies, humanized antibodies, human antibodies, and complementary determining region (CDR)-grafted antibodies, including compounds which include CDR or antigen-binding sequences, which specifically bind to a polypeptide of the invention. An “antibody fragment” refers to a portion of an antibody polypeptide that retains some part of the function of the intact antibody. For example, an antibody fragment can retain some or all of the antigen binding ability of the intact antibody. Antibody fragments include, for example, Fab, Fab′, F(ab′)₂, and Fv. Screening assays to determine binding specificity or exclusivity of an antibody or antibody fragment of the invention are well known in the art (see Harlow et al. (Eds), Antibodies A Laboratory Manual; Cold Spring Harbor Laboratory; Cold Spring Harbor, N.Y. (1988)).

[0045] Antibodies that can be used in the invention can be produced using any method well known in the art, using any polypeptide, or immunogenic fragment thereof, of the invention. For example, a humanized antibody can be prepared with fully human germline framework regions. In addition, immunogenic polypeptides can be isolated from natural sources, from recombinant host cells, or can be chemically synthesized. Methods for synthesizing such peptides are known in the art, for example, as in R. P. Merrifield, J. Amer. Chem. Soc. 85: 2149-2154 (1963); J. L. Krstenansky, et al., FEBS Lett. 211: 10 (1987).

[0046] As used herein, the term “camptothecin derivative” refers to a compound that has a structure the same or substantially the same as camptothecin and that can be hydrolyzed by butyrylcholinesterase or a butyrylcholinesterase variant. For example, a camptothecin derivative can be hydrolyzed by the F227A/L286Q variant (SEQ ID NO:6). Camptothecin is derived from the stem bark of a Chinese tree called Camptotheca acuminata Decaisne. Camptothecin derivatives can inhibit DNA topoisomerase I through their metabolic break-down products. The structure of a water soluble campthothecin derivative, CPT-11, is shown in FIG. 2. The chemical name of CPT-11 is 7-ethyl-10-[4-(1-piperidino)-1-piperidine]carbonyloxycamptothecin. CPT-11 is also known by the names CAMPTOSAR and Irinotecan. Members of the camptothecins include, for example, topotecan, irinotecan, 9-aminocamptothecin and 9-nitrocamptothecin which are analogs of the plant alkaloid 20(S)-camptothecin.

[0047] As used herein, the term “topoisomerase inhibitor” refers to a compound that can inhibit a topoisomerase. Several topoisomerases are known in the literature. For example, a topoisomerase inhibitor can inhibit a type I topoisomerase, such as topoisomerase I, or a type II topoisomerase. Type I enzymes act by making a transient break in one strand of DNA and type II enzymes act by introducing a transient double strand break. Some DNA topoisonerases can relax or remove only negative supercoils from DNA while others can relax both negative and positive supercoils and still others can introduce negative supercoils. An example of a topoisomerase inhibitor is SN-38, the structure of which is shown in FIG. 2.

[0048] The chemical name of SN-38 is 7-ethyl-10-hydroxycamptothecin. In vitro, SN38 has been shown to be greater than 1000-fold more cytotoxic than CPT-11 (Pavillard et al., Cancer Chemother Pharmacol. 49: 329-35(2002)). In humans it is believed that prodrug conversion takes place primarily in the liver through the activities of two carboxylesterase isoforms, human carboxylesterase-1 (hCE-1) and human carboxylesterase-2 (hCE-2) (Humerickhouse et al., Cancer Res 60: 1189-92(2000)). The Km values are 3.4 μM and 43 μM for hCE-2 and hCE-1, respectively, and the catalytic efficiency of hCE-2 is 60-fold higher than that of hCE-1. At pharmacologically relevant concentrations of the drug (˜1-10 μM), hCE-2 converts CPT-11 to SN38 at a 25-30-fold higher rate than hCE-1 (12). SN-38 can interact with topoisomerase I and DNA to form cleavage complexes, and prevent resealing of the topoisomerase I-mediated DNA single strand breaks. This interaction eventually can lead to double-strand DNA breaks and cell death such as apoptosis.

[0049] As used herein, the term “campthothecin conversion activity” or campthothecin hydrolysis activity is intended to mean the chemical conversion of a campthothecin derivative to a topoisomerase inhibitor. For example, the conversion of CPT-11 to SN-38 is shown in FIG. 2. Conversion activity can be measured both directly or indirectly using several assays described herein (see Example II, III, and IV).

[0050] As used herein, the term “effective amount” is intended to mean an amount of a butyrylcholinesterase variant of the invention that can reduce the severity of cancer. Reduction in severity includes, for example, an arrest or a decrease in symptoms, physiological indicators, biochemical markers or metabolic indicators. Symptoms of cancer include, for example, weight loss, pain, and organ failure. As used herein, the term “treating” is intended to mean causing a reduction in the severity of cancer.

[0051] The invention provides a butyrylcholinesterase variant having the amino acid sequence selected from SEQ ID NOS: 4, 6, 8, 10, 12, 14, 24, 26, 28, 30, 32, 34, 36, 38, 40, 42, 44, 46, 48, 50, 52, 54, 56, 58, 60, 62, 64, 66, 68, 70, 72, 74, 76, 78, 80, 82, 84, 86, 88, 90, 92, 94, 96, 98, 100, 102, 104, 106, 108, 110, 112, 114, 116, 118, 120, 122, 124, 126, 128, 130, 132, 134, 136, 138, 140, 142, 144, 146, 148, 150, 152, 154, 156, 158, 160, 162, 164, 166, 168, 170, 172, 174, 176, 178, 180, 182, 184, 186, 188, 190, 192, 194, and 196, or functional fragment thereof. The invention also provides a butyrylcholinesterase variant where the amino acid contains SEQ ID NO: 4, or functional fragment thereof. The invention further provides a butyrylcholinesterase variant where the amino acid contains SEQ ID NO: 6, or functional fragment thereof. The invention also provides a butyrylcholinesterase variant where the amino acid contains SEQ ID NO: 8, or functional fragment thereof. The invention further provides a butyrylcholinesterase variant where the amino acid contains SEQ ID NO: 10, or functional fragment thereof. The invention also provides a butyrylcholinesterase variant where the amino acid contains SEQ ID NO: 12, or functional fragment thereof. The invention further provides a butyrylcholinesterase variant where the amino acid contains SEQ ID NO: 14, or functional fragment thereof. The invention further provides a butyrylcholinesterase variant where the amino acid contains SEQ ID NO: 24, or functional fragment thereof. The invention further provides a butyrylcholinesterase variant where the amino acid contains SEQ ID NO: 26, or functional fragment thereof. The invention further provides a butyrylcholinesterase variant where the amino acid contains SEQ ID NO: 28, or functional fragment thereof. The invention further provides a butyrylcholinesterase variant where the amino acid contains SEQ ID NO: 30, or functional fragment thereof. The invention further provides a butyrylcholinesterase variant where the amino acid contains SEQ ID NO: 32, or functional fragment thereof.

[0052] The invention further provides a butyrylcholinesterase variant where the amino acid contains SEQ ID NO: 34, or functional fragment thereof. The invention further provides a butyrylcholinesterase variant where the amino acid contains SEQ ID NO: 36, or functional fragment thereof. The invention further provides a butyrylcholinesterase variant where the amino acid contains SEQ ID NO: 38, or functional fragment thereof. The invention further provides a butyrylcholinesterase variant where the amino acid contains SEQ ID NO: 40, or functional fragment thereof. The invention further provides a butyrylcholinesterase variant where the amino acid contains SEQ ID NO: 42, or functional fragment thereof. The invention further provides a butyrylcholinesterase variant where the amino acid contains SEQ ID NO: 44, or functional fragment thereof. The invention further provides a butyrylcholinesterase variant where the amino acid contains SEQ ID NO: 46, or functional fragment thereof. The invention further provides a butyrylcholinesterase variant where the amino acid contains SEQ ID NO: 48, or functional fragment thereof. The invention further provides a butyrylcholinesterase variant where the amino acid contains SEQ ID NO: 50, or functional fragment thereof. The invention further provides a butyrylcholinesterase variant where the amino acid contains SEQ ID NO: 52, or functional fragment thereof. The invention further provides a butyrylcholinesterase variant where the amino acid contains SEQ ID NO: 54, or functional fragment thereof. The invention further provides a butyrylcholinesterase variant where the amino acid contains SEQ ID NO: 56, or functional fragment thereof. The invention further provides a butyrylcholinesterase variant where the amino acid contains SEQ ID NO: 58, or functional fragment thereof. The invention further provides a butyrylcholinesterase variant where the amino acid contains SEQ ID NO: 60, or functional fragment thereof. The invention further provides a butyrylcholinesterase variant where the amino acid contains SEQ ID NO: 62, or functional fragment thereof. The invention further provides a butyrylcholinesterase variant where the amino acid contains SEQ ID NO: 64, or functional fragment thereof. The invention further provides a butyrylcholinesterase variant where the amino acid contains SEQ ID NO: 66, or functional fragment thereof. The invention further provides a butyrylcholinesterase variant where the amino acid contains SEQ ID NO: 68, or functional fragment thereof. The invention further provides a butyrylcholinesterase variant where the amino acid contains SEQ ID NO: 70, or functional fragment thereof. The invention further provides a butyrylcholinesterase variant where the amino acid contains SEQ ID NO: 72, or functional fragment thereof. The invention further provides a butyrylcholinesterase variant where the amino acid contains SEQ ID NO: 74, or functional fragment thereof. The invention further provides a butyrylcholinesterase variant where the amino acid contains SEQ ID NO: 76, or functional fragment thereof. The invention further provides a butyrylcholinesterase variant where the amino acid contains SEQ ID NO: 78, or functional fragment thereof. The invention further provides a butyrylcholinesterase variant where the amino acid contains SEQ ID NO: 80, or functional fragment thereof. The invention further provides a butyrylcholinesterase variant where the amino acid contains SEQ ID NO: 82, or functional fragment thereof. The invention further provides a butyrylcholinesterase variant where the amino acid contains SEQ ID NO: 84, or functional fragment thereof. The invention further provides a butyrylcholinesterase variant where the amino acid contains SEQ ID NO: 86, or functional fragment thereof. The invention further provides a butyrylcholinesterase variant where the amino acid contains SEQ ID NO: 88, or functional fragment thereof. The invention further provides a butyrylcholinesterase variant where the amino acid contains SEQ ID NO: 90, or functional fragment thereof. The invention further provides a butyrylcholinesterase variant where the amino acid contains SEQ ID NO: 92, or functional fragment thereof. The invention further provides a butyrylcholinesterase variant where the amino acid contains SEQ ID NO: 94, or functional fragment thereof. The invention further provides a butyrylcholinesterase variant where the amino acid contains SEQ ID NO: 96, or functional fragment thereof. The invention further provides a butyrylcholinesterase variant where the amino acid contains SEQ ID NO: 98, or functional fragment thereof. The invention further provides a butyrylcholinesterase variant where the amino acid contains SEQ ID NO: 100, or functional fragment thereof. The invention further provides a butyrylcholinesterase variant where the amino acid contains SEQ ID NO: 102, or functional fragment thereof. The invention further provides a butyrylcholinesterase variant where the amino acid contains SEQ ID NO: 104, or functional fragment thereof. The invention further provides a butyrylcholinesterase variant where the amino acid contains SEQ ID NO: 106, or functional fragment thereof. The invention further provides a butyrylcholinesterase variant where the amino acid contains SEQ ID NO: 108, or functional fragment thereof. The invention further provides a butyrylcholinesterase variant where the amino acid contains SEQ ID NO: 110, or functional fragment thereof. The invention further provides a butyrylcholinesterase variant where the amino acid contains SEQ ID NO: 112, or functional fragment thereof. The invention further provides a butyrylcholinesterase variant where the amino acid contains SEQ ID NO: 114, or functional fragment thereof. The invention further provides a butyrylcholinesterase variant where the amino acid contains SEQ ID NO: 116, or functional fragment thereof. The invention further provides a butyrylcholinesterase variant where the amino acid contains SEQ ID NO: 118, or functional fragment thereof. The invention further provides a butyrylcholinesterase variant where the amino acid contains SEQ ID NO: 120, or functional fragment thereof. The invention further provides a butyrylcholinesterase variant where the amino acid contains SEQ ID NO: 122, or functional fragment thereof. The invention further provides a butyrylcholinesterase variant where the amino acid contains SEQ ID NO: 124, or functional fragment thereof. The invention further provides a butyrylcholinesterase variant where the amino acid contains SEQ ID NO: 126, or functional fragment thereof. The invention further provides a butyrylcholinesterase variant where the amino acid contains SEQ ID NO: 128, or functional fragment thereof. The invention further provides a butyrylcholinesterase variant where the amino acid contains SEQ ID NO: 130, or functional fragment thereof. The invention further provides a butyrylcholinesterase variant where the amino acid contains SEQ ID NO: 132, or functional fragment thereof. The invention further provides a butyrylcholinesterase variant where the amino acid contains SEQ ID NO: 134, or functional fragment thereof. The invention further provides a butyrylcholinesterase variant where the amino acid contains SEQ ID NO: 136, or functional fragment thereof. The invention further provides a butyrylcholinesterase variant where the amino acid contains SEQ ID NO: 138, or functional fragment thereof. The invention further provides a butyrylcholinesterase variant where the amino acid contains SEQ ID NO: 140, or functional fragment thereof. The invention further provides a butyrylcholinesterase variant where the amino acid contains SEQ ID NO: 142, or functional fragment thereof. The invention further provides a butyrylcholinesterase variant where the amino acid contains SEQ ID NO: 144, or functional fragment thereof. The invention further provides a butyrylcholinesterase variant where the amino acid contains SEQ ID NO: 146, or functional fragment thereof. The invention further provides a butyrylcholinesterase variant where the amino acid contains SEQ ID NO: 148, or functional fragment thereof. The invention further provides a butyrylcholinesterase variant where the amino acid contains SEQ ID NO: 150, or functional fragment thereof. The invention further provides a butyrylcholinesterase variant where the amino acid contains SEQ ID NO: 152, or functional fragment thereof. The invention further provides a butyrylcholinesterase variant where the amino acid contains SEQ ID NO: 154, or functional fragment thereof. The invention further provides a butyrylcholinesterase variant where the amino acid contains SEQ ID NO: 156, or functional fragment thereof. The invention further provides a butyrylcholinesterase variant where the amino acid contains SEQ ID NO: 158, or functional fragment thereof. The invention further provides a butyrylcholinesterase variant where the amino acid contains SEQ ID NO: 160, or functional fragment thereof. The invention further provides a butyrylcholinesterase variant where the amino acid contains SEQ ID NO: 162, or functional fragment thereof. The invention further provides a butyrylcholinesterase variant where the amino acid contains SEQ ID NO: 164, or functional fragment thereof. The invention further provides a butyrylcholinesterase variant where the amino acid contains SEQ ID NO: 166, or functional fragment thereof. The invention further provides a butyrylcholinesterase variant where the amino acid contains SEQ ID NO: 168, or functional fragment thereof. The invention further provides a butyrylcholinesterase variant where the amino acid contains SEQ ID NO: 170, or functional fragment thereof. The invention further provides a butyrylcholinesterase variant where the amino acid contains SEQ ID NO: 172, or functional fragment thereof. The invention further provides a butyrylcholinesterase variant where the amino acid contains SEQ ID NO: 174, or functional fragment thereof. The invention further provides a butyrylcholinesterase variant where the amino acid contains SEQ ID NO: 176, or functional fragment thereof. The invention further provides a butyrylcholinesterase variant where the amino acid contains SEQ ID NO: 178, or functional fragment thereof. The invention further provides a butyrylcholinesterase variant where the amino acid contains SEQ ID NO: 180, or functional fragment thereof. The invention further provides a butyrylcholinesterase variant where the amino acid contains SEQ ID NO: 182, or functional fragment thereof. The invention further provides a butyrylcholinesterase variant where the amino acid contains SEQ ID NO: 184, or functional fragment thereof. The invention further provides a butyrylcholinesterase variant where the amino acid contains SEQ ID NO: 186, or functional fragment thereof. The invention further provides a butyrylcholinesterase variant where the amino acid contains SEQ ID NO: 188, or functional fragment thereof. The invention further provides a butyrylcholinesterase variant where the amino acid contains SEQ ID NO: 190, or functional fragment thereof. The invention further provides a butyrylcholinesterase variant where the amino acid contains SEQ ID NO: 192, or functional fragment thereof. The invention further provides a butyrylcholinesterase variant where the amino acid contains SEQ ID NO: 194, or functional fragment thereof. The invention further provides a butyrylcholinesterase variant where the amino acid contains SEQ ID NO: 196, or functional fragment thereof.

[0053] The invention provides a butyrylcholinesterase variant having a 3000-fold increase in camptothecin conversion activity compared to butyrylcholinesterase, or functional fragment thereof. The invention also provides a butyrylcholinesterase variant having at least a 4-fold, 6-fold, 8-fold, 10-fold, 15-fold, 20-fold, 25-fold, 30-fold, 35-fold, 40-fold, 45-fold, 50-fold, 100-fold, 200-fold, 300-fold, 400-fold, 500-fold, 600-fold, 700-fold, 800-fold, 900-fold, 1000-fold, 1100-fold, 1200-fold, 1300-fold, 1400-fold, 1500-fold, 1600-fold, 1700-fold, 1800-fold, 1900-fold, 2000-fold, 2100-fold, 2200-fold, 2300-fold, 2400-fold, 2500-fold, 2600-fold, 2700-fold, 2800-fold, 2900-fold, 3000-fold, 3100-fold, 3200-fold, 3500-fold or greater increase in camptothecin conversion activity compared to butyrylcholinesterase, or functional fragment thereof.

[0054] The invention further provides a nucleic acid encoding a butyrylcholinesterase variant having the nucleic acid sequence selected from SEQ ID NOS: 3, 5, 7, 9, 11, 13, 23, 25, 27, 29, 31, 33, 35, 37, 39, 41, 43, 45, 47, 49, 51, 53, 55, 57, 59, 61, 63, 65, 67, 69, 71, 73, 75, 77, 79, 81, 83, 85, 87, 89, 91, 93, 95, 97, 99, 101, 103, 105, 107, 109, 111, 113, 115, 117, 119, 121, 123, 125, 127, 129, 131, 133, 135, 137, 139, 141, 143, 145, 147, 149, 151, 153, 155, 157, 159, 161, 163, 165, 167, 169, 171, 173, 175, 177, 179, 181, 183, 185, 187, 189, 191, 193, and 195, or fragment thereof. In addition the invention provides a nucleic acid encoding a butyrylcholinesterase variant having the amino acid sequence selected from SEQ ID NOS: 4, 6, 8, 10, 12, 14, 24, 26, 28, 30, 32, 34, 36, 38, 40, 42, 44, 46, 48, 50, 52, 54, 56, 58, 60, 62, 64, 66, 68, 70, 72, 74, 76, 78, 80, 82, 84, 86, 88, 90, 92, 94, 96, 98, 100, 102, 104, 106, 108, 110, 112, 114, 116, 118, 120, 122, 124, 126, 128, 130, 132, 134, 136, 138, 140, 142, 144, 146, 148, 150, 152, 154, 156, 158, 160, 162, 164, 166, 168, 170, 172, 174, 176, 178, 180, 182, 184, 186, 188, 190, 192, 194, and 196, or a functional fragment thereof. Further, the invention provides a nucleic acid encoding a butyrylcholinesterase variant containing the nucleic acid sequence SEQ ID NO: 3, or a functional fragment thereof. The invention also provides a nucleic acid encoding a butyrylcholinesterase variant containing the nucleic acid sequence SEQ ID NO: 5, or a functional fragment thereof. In addition the invention provides a nucleic acid encoding a butyrylcholinesterase variant containing the nucleic acid sequence SEQ ID NO: 7, or a functional fragment thereof. The invention also provides a nucleic acid encoding a butyrylcholinesterase variant containing the nucleic acid sequence SEQ ID NO: 9, or a functional fragment thereof. The invention also provides a nucleic acid encoding a butyrylcholinesterase variant containing the nucleic acid sequence SEQ ID NO: 11, or a functional fragment thereof. The invention further provides a nucleic acid encoding a butyrylcholinesterase variant containing the nucleic acid sequence SEQ ID NO: 13, or a functional fragment thereof. The invention further provides a nucleic acid encoding a butyrylcholinesterase variant containing the nucleic acid sequence SEQ ID NO: 23, or a functional fragment thereof. The invention further provides a nucleic acid encoding a butyrylcholinesterase variant containing the nucleic acid sequence SEQ ID NO: 25, or a functional fragment thereof. The invention further provides a nucleic acid encoding a butyrylcholinesterase variant containing the nucleic acid sequence SEQ ID NO: 27, or a functional fragment thereof. The invention further provides a nucleic acid encoding a butyrylcholinesterase variant containing the nucleic acid sequence SEQ ID NO: 29, or a functional fragment thereof. The invention further provides a nucleic acid encoding a butyrylcholinesterase variant containing the nucleic acid sequence SEQ ID NO: 31, or a functional fragment thereof. The invention further provides a nucleic acid encoding a butyrylcholinesterase variant containing the nucleic acid sequence SEQ ID NO: 33, or a functional fragment thereof. The invention further provides a nucleic acid encoding a butyrylcholinesterase variant containing the nucleic acid sequence SEQ ID NO: 35, or a functional fragment thereof. The invention further provides a nucleic acid encoding a butyrylcholinesterase variant containing the nucleic acid sequence SEQ ID NO: 37, or a functional fragment thereof. The invention further provides a nucleic acid encoding a butyrylcholinesterase variant containing the nucleic acid sequence SEQ ID NO: 39, or a functional fragment thereof. The invention further provides a nucleic acid encoding a butyrylcholinesterase variant containing the nucleic acid sequence SEQ ID NO: 41, or a functional fragment thereof. The invention further provides a nucleic acid encoding a butyrylcholinesterase variant containing the nucleic acid sequence SEQ ID NO: 43, or a functional fragment thereof. The invention further provides a nucleic acid encoding a butyrylcholinesterase variant containing the nucleic acid sequence SEQ ID NO: 45, or a functional fragment thereof. The invention further provides a nucleic acid encoding a butyrylcholinesterase variant containing the nucleic acid sequence SEQ ID NO: 47, or a functional fragment thereof. The invention further provides a nucleic acid encoding a butyrylcholinesterase variant containing the nucleic acid sequence SEQ ID NO: 49, or a functional fragment thereof. The invention further provides a nucleic acid encoding a butyrylcholinesterase variant containing the nucleic acid sequence SEQ ID NO: 51, or a functional fragment thereof. The invention further provides a nucleic acid encoding a butyrylcholinesterase variant containing the nucleic acid sequence SEQ ID NO: 53, or a functional fragment thereof. The invention further provides a nucleic acid encoding a butyrylcholinesterase variant containing the nucleic acid sequence SEQ ID NO: 55, or a functional fragment thereof. The invention further provides a nucleic acid encoding a butyrylcholinesterase variant containing the nucleic acid sequence SEQ ID NO: 57, or a functional fragment thereof. The invention further provides a nucleic acid encoding a butyrylcholinesterase variant containing the nucleic acid sequence SEQ ID NO: 59, or a functional fragment thereof. The invention further provides a nucleic acid encoding a butyrylcholinesterase variant containing the nucleic acid sequence SEQ ID NO: 61, or a functional fragment thereof. The invention further provides a nucleic acid encoding a butyrylcholinesterase variant containing the nucleic acid sequence SEQ ID NO: 63, or a functional fragment thereof. The invention further provides a nucleic acid encoding a butyrylcholinesterase variant containing the nucleic acid sequence SEQ ID NO: 65, or a functional fragment thereof. The invention further provides a nucleic acid encoding a butyrylcholinesterase variant containing the nucleic acid sequence SEQ ID NO: 67, or a functional fragment thereof. The invention further provides a nucleic acid encoding a butyrylcholinesterase variant containing the nucleic acid sequence SEQ ID NO: 69, or a functional fragment thereof. The invention further provides a nucleic acid encoding a butyrylcholinesterase variant containing the nucleic acid sequence SEQ ID NO: 71, or a functional fragment thereof. The invention further provides a nucleic acid encoding a butyrylcholinesterase variant containing the nucleic acid sequence SEQ ID NO: 73, or a functional fragment thereof. The invention further provides a nucleic acid encoding a butyrylcholinesterase variant containing the nucleic acid sequence SEQ ID NO: 75, or a functional fragment thereof. The invention further provides a nucleic acid encoding a butyrylcholinesterase variant containing the nucleic acid sequence SEQ ID NO: 77, or a functional fragment thereof. The invention further provides a nucleic acid encoding a butyrylcholinesterase variant containing the nucleic acid sequence SEQ ID NO: 79, or a functional fragment thereof. The invention further provides a nucleic acid encoding a butyrylcholinesterase variant containing the nucleic acid sequence SEQ ID NO: 81, or a functional fragment thereof. The invention further provides a nucleic acid encoding a butyrylcholinesterase variant containing the nucleic acid sequence SEQ ID NO: 83, or a functional fragment thereof. The invention further provides a nucleic acid encoding a butyrylcholinesterase variant containing the nucleic acid sequence SEQ ID NO: 85, or a functional fragment thereof. The invention further provides a nucleic acid encoding a butyrylcholinesterase variant containing the nucleic acid sequence SEQ ID NO: 87, or a functional fragment thereof. The invention further provides a nucleic acid encoding a butyrylcholinesterase variant containing the nucleic acid sequence SEQ ID NO: 89, or a functional fragment thereof. The invention further provides a nucleic acid encoding a butyrylcholinesterase variant containing the nucleic acid sequence SEQ ID NO: 91, or a functional fragment thereof. The invention further provides a nucleic acid encoding a butyrylcholinesterase variant containing the nucleic acid sequence SEQ ID NO: 93, or a functional fragment thereof. The invention further provides a nucleic acid encoding a butyrylcholinesterase variant containing the nucleic acid sequence SEQ ID NO: 95, or a functional fragment thereof. The invention further provides a nucleic acid encoding a butyrylcholinesterase variant containing the nucleic acid sequence SEQ ID NO: 97, or a functional fragment thereof. The invention further provides a nucleic acid encoding a butyrylcholinesterase variant containing the nucleic acid sequence SEQ ID NO: 99, or a functional fragment thereof. The invention further provides a nucleic acid encoding a butyrylcholinesterase variant containing the nucleic acid sequence SEQ ID NO: 101, or a functional fragment thereof. The invention further provides a nucleic acid encoding a butyrylcholinesterase variant containing the nucleic acid sequence SEQ ID NO: 103, or a functional fragment thereof. The invention further provides a nucleic acid encoding a butyrylcholinesterase variant containing the nucleic acid sequence SEQ ID NO: 105, or a functional fragment thereof. The invention further provides a nucleic acid encoding a butyrylcholinesterase variant containing the nucleic acid sequence SEQ ID NO: 107, or a functional fragment thereof. The invention further provides a nucleic acid encoding a butyrylcholinesterase variant containing the nucleic acid sequence SEQ ID NO: 109, or a functional fragment thereof. The invention further provides a nucleic acid encoding a butyrylcholinesterase variant containing the nucleic acid sequence SEQ ID NO: 111, or a functional fragment thereof. The invention further provides a nucleic acid encoding a butyrylcholinesterase variant containing the nucleic acid sequence SEQ ID NO: 113, or a functional fragment thereof. The invention further provides a nucleic acid encoding a butyrylcholinesterase variant containing the nucleic acid sequence SEQ ID NO: 115, or a functional fragment thereof. The invention further provides a nucleic acid encoding a butyrylcholinesterase variant containing the nucleic acid sequence SEQ ID NO: 117, or a functional fragment thereof. The invention further provides a nucleic acid encoding a butyrylcholinesterase variant containing the nucleic acid sequence SEQ ID NO: 119, or a functional fragment thereof. The invention further provides a nucleic acid encoding a butyrylcholinesterase variant containing the nucleic acid sequence SEQ ID NO: 121, or a functional fragment thereof. The invention further provides a nucleic acid encoding a butyrylcholinesterase variant containing the nucleic acid sequence SEQ ID NO: 123, or a functional fragment thereof. The invention further provides a nucleic acid encoding a butyrylcholinesterase variant containing the nucleic acid sequence SEQ ID NO: 125, or a functional fragment thereof. The invention further provides a nucleic acid encoding a butyrylcholinesterase variant containing the nucleic acid sequence SEQ ID NO: 127, or a functional fragment thereof. The invention further provides a nucleic acid encoding a butyrylcholinesterase variant containing the nucleic acid sequence SEQ ID NO: 129, or a functional fragment thereof. The invention further provides a nucleic acid encoding a butyrylcholinesterase variant containing the nucleic acid sequence SEQ ID NO: 131, or a functional fragment thereof. The invention further provides a nucleic acid encoding a butyrylcholinesterase variant containing the nucleic acid sequence SEQ ID NO: 133, or a functional fragment thereof. The invention further provides a nucleic acid encoding a butyrylcholinesterase variant containing the nucleic acid sequence SEQ ID NO: 135, or a functional fragment thereof. The invention further provides a nucleic acid encoding a butyrylcholinesterase variant containing the nucleic acid sequence SEQ ID NO: 137, or a functional fragment thereof. The invention further provides a nucleic acid encoding a butyrylcholinesterase variant containing the nucleic acid sequence SEQ ID NO: 139, or a functional fragment thereof. The invention further provides a nucleic acid encoding a butyrylcholinesterase variant containing the nucleic acid sequence SEQ ID NO: 141, or a functional fragment thereof. The invention further provides a nucleic acid encoding a butyrylcholinesterase variant containing the nucleic acid sequence SEQ ID NO: 143, or a functional fragment thereof. The invention further provides a nucleic acid encoding a butyrylcholinesterase variant containing the nucleic acid sequence SEQ ID NO: 145, or a functional fragment thereof. The invention further provides a nucleic acid encoding a butyrylcholinesterase variant containing the nucleic acid sequence SEQ ID NO: 147, or a functional fragment thereof. The invention further provides a nucleic acid encoding a butyrylcholinesterase variant containing the nucleic acid sequence SEQ ID NO: 149, or a functional fragment thereof. The invention further provides a nucleic acid encoding a butyrylcholinesterase variant containing the nucleic acid sequence SEQ ID NO: 151, or a functional fragment thereof. The invention further provides a nucleic acid encoding a butyrylcholinesterase variant containing the nucleic acid sequence SEQ ID NO: 153, or a functional fragment thereof. The invention further provides a nucleic acid encoding a butyrylcholinesterase variant containing the nucleic acid sequence SEQ ID NO: 155, or a functional fragment thereof. The invention further provides a nucleic acid encoding a butyrylcholinesterase variant containing the nucleic acid sequence SEQ ID NO: 157, or a functional fragment thereof. The invention further provides a nucleic acid encoding a butyrylcholinesterase variant containing the nucleic acid sequence SEQ ID NO: 159, or a functional fragment thereof. The invention further provides a nucleic acid encoding a butyrylcholinesterase variant containing the nucleic acid sequence SEQ ID NO: 161, or a functional fragment thereof. The invention further provides a nucleic acid encoding a butyrylcholinesterase variant containing the nucleic acid sequence SEQ ID NO: 163, or a functional fragment thereof. The invention further provides a nucleic acid encoding a butyrylcholinesterase variant containing the nucleic acid sequence SEQ ID NO: 165, or a functional fragment thereof. The invention further provides a nucleic acid encoding a butyrylcholinesterase variant containing the nucleic acid sequence SEQ ID NO: 167, or a functional fragment thereof. The invention further provides a nucleic acid encoding a butyrylcholinesterase variant containing the nucleic acid sequence SEQ ID NO: 169, or a functional fragment thereof. The invention further provides a nucleic acid encoding a butyrylcholinesterase variant containing the nucleic acid sequence SEQ ID NO: 171, or a functional fragment thereof. The invention further provides a nucleic acid encoding a butyrylcholinesterase variant containing the nucleic acid sequence SEQ ID NO: 173, or a functional fragment thereof. The invention further provides a nucleic acid encoding a butyrylcholinesterase variant containing the nucleic acid sequence SEQ ID NO: 175, or a functional fragment thereof. The invention further provides a nucleic acid encoding a butyrylcholinesterase variant containing the nucleic acid sequence SEQ ID NO: 177, or a functional fragment thereof. The invention further provides a nucleic acid encoding a butyrylcholinesterase variant containing the nucleic acid sequence SEQ ID NO: 179, or a functional fragment thereof. The invention further provides a nucleic acid encoding a butyrylcholinesterase variant containing the nucleic acid sequence SEQ ID NO: 181, or a functional fragment thereof. The invention further provides a nucleic acid encoding a butyrylcholinesterase variant containing the nucleic acid sequence SEQ ID NO: 183, or a functional fragment thereof. The invention further provides a nucleic acid encoding a butyrylcholinesterase variant containing the nucleic acid sequence SEQ ID NO: 185, or a functional fragment thereof. The invention further provides a nucleic acid encoding a butyrylcholinesterase variant containing the nucleic acid sequence SEQ ID NO: 187, or a functional fragment thereof. The invention further provides a nucleic acid encoding a butyrylcholinesterase variant containing the nucleic acid sequence SEQ ID NO: 189, or a functional fragment thereof. The invention further provides a nucleic acid encoding a butyrylcholinesterase variant containing the nucleic acid sequence SEQ ID NO: 191, or a functional fragment thereof. The invention further provides a nucleic acid encoding a butyrylcholinesterase variant containing the nucleic acid sequence SEQ ID NO: 193, or a functional fragment thereof. The invention further provides a nucleic acid encoding a butyrylcholinesterase variant containing the nucleic acid sequence SEQ ID NO: 195, or a functional fragment thereof.

[0055] Cholinesterases are ubiquitous, polymorphic carboxylase Type B enzymes capable of hydrolyzing the neurotransmitter acetylcholine and numerous ester-containing compounds. Two major cholinesterases are acetylcholinesterase and butyrylcholinesterase. Butyrylcholinesterase catalyzes the hydrolysis of a number of choline esters as shown:

$$Acetylcholine + H2O {\to }^{BChE} Choline + Corresponding Acid$$

[0056] Butyrylcholinesterase preferentially uses butyrylcholine and benzoylcholine as substrates. Butyrylcholinesterase is found in mammalian blood plasma, liver, pancreas, intestinal mucosa and the white matter of the central nervous system. The human gene encoding butyrylcholinesterase is located on chromosome 3 and over thirty naturally occuring genetic variations of butyrylcholinesterase are known. The butyrylcholinesterase polypeptide is 574 amino acids in length and encoded by 1,722 base pairs of coding sequence. Three naturally occuring butyrylcholinesterase variations are the atypical alleles referred to as A variant, the J variant and the K variant. The A variant has an D70G mutation and is rare (0.5% allelic frequency), while the J variant has a E497V mutation and has only been found in one family. The K variant has a point mutation at nucleotide 1615, which results in an A539T mutation and has an allelic frequency of around 12% in Caucasians.

[0057] In addition to the naturally-occurring human variations of butyrylcholinesterase, a number of species variations are known. The amino acid sequence of cat butyrylcholinesterase is 88% identical with human butyrylcholinesterase. Of the seventy amino acids that differ, three are located in the active site gorge and are termed A277L, P285L and F398I. Similarly, horse butyrylcholinesterase has three amino acid differences in the active site compared with human butyrylcholinesterase, which are A277V, P285L and F398I. The amino acid sequence of rat butyrylcholinesterase contains 6 amino acid differences in the active site gorge, which are A277K, V280L, T284S, P285I, L286R and V288I.

[0058] Naturally occurring human butyrylcholinesterase variations, species variations as well as recombinantly prepared mutations have previously been described by Xie et al., Molecular Pharmacology 55: 83-91 (1999). A butyrylcholinesterase variant of the invention can be prepared by a variety of methods well known in the art. If desired, random mutagenesis can be performed to prepare a butyrylcholinesterase variant of the invention. Alternatively, as disclosed herein, random mutagenesis focused in discrete regions based on the information obtained from structural, biochemical and modeling methods described herein can be performed to target those amino acids predicted to be important for catalytic activity. For example, molecular modeling of a substrate in the active site of butyrylcholinesterase can be utilized to predict amino acid alterations that allow for higher catalytic efficiency based on a better fit between the enzyme and its substrate. In addition, molecular modeling can be used to predict amino acid alterations that decrease steric hinderance between the enzyme and substrate. Based on studies with cocaine as a substrate, residues predicted to be important for hydrolysis activity include 8 hydrophobic gorge residues and the catalytic triad residues. Furthermore, it is understood that amino acid alterations of residues important for the functional structure of a butyrylcholinesterase variant, which include the cysteine residues ⁶⁵Cys-⁹²Cys, ²⁵²Cys⁻²⁶³Cys, and ⁴⁰⁰Cys⁻⁵¹⁹Cys involved in intrachain disulfide bonds are generally not altered in the preparation of a butyrylcholinesterase variant that has hydrolysis activity.

[0059] Following mutagenesis of butyrylcholinesterase or a butyrylcholinesterase variant expression, purification and functional characterization of the butyrylcholinesterase variant can be performed by methods well known in the art.

[0060] A butyrylcholinesterase variant of the invention exhibits camptothecin conversion or hydrolysis activity. As disclosed herein, a butyrylcholinesterase variant of the invention can have enhanced camptothecin conversion or hydrolysis activity and can be used to treat cancer. A polypeptide having minor modifications compared to a butyrylcholinesterase variant of the invention is encompassed by the invention so long as equivalent camptothecin conversion or hydrolysis activity is retained. In addition, functional fragments of a butyrylcholinesterase variant that still retain some or all of the camptothecin conversion or hydrolysis activity of the parent butyrylcholinesterase variant are similarly included in the invention. Similarly, functional fragments of nucleic acids, which encode functional fragments of a butyrylcholinesterase variant of the invention are similarly encompassed by the invention.

[0061] A functional fragment of a butyrylcholinesterase or a butyrylcholinesterase variant of the invention can be prepared by recombinant methods involving expression of a nucleic acid molecule encoding the butyrylcholinesterase variant or functional fragment thereof, followed by isolation of the variant or functional fragment thereof by routine biochemical methods described herein. It is understood that functional fragments can also be prepared by enzymatic or chemical cleavage of the full length butyrylcholinesterase variant. Methods for enzymatic and chemical cleavage and for purification of the resultant peptide fragments are well known in the art (see, for example, Deutscher, Methods in Enzymology, Vol. 182, “Guide to Protein Purification,” San Diego: Academic Press, Inc. (1990), which is incorporated herein by reference).

[0062] Furthermore, functional fragments of a butyrylcholinesterase variant can be produced by chemical synthesis. If desired, such molecules can be modified to include D-stereoisomers, non-naturally occurring amino acids, and amino acid analogs and mimetics in order to optimize their functional activity, stability or bioavailability. Examples of modified amino acids and their uses are presented in Sawyer, Peptide Based Drug Design, ACS, Washington (1995) and Gross and Meienhofer, The Peptides: Analysis, Synthesis, Biology, Academic Press, Inc., New York (1983), both of which are incorporated herein by reference.

[0063] If desired, random segments of a butyrylcholinesterase variant can be prepared and tested in the assays described herein. A fragment having any desired boundaries and modifications compared to the amino acid sequence of the reference butyrylcholinesterase or butyrylcholinesterase variant of the invention can be prepared. Alternatively, available information obtained by the structural, biochemical and modeling methods described herein can be used to prepare only those fragments of a butyrylcholinesterase variant that are likely to retain the camptothecin conversion or hydrolysis activity of the parent variant. As described herein, residues predicted to be important for camptothecin conversion or hydrolysis activity include 8 hydrophobic gorge residues and the catalytic triad residues. Furthermore, residues important for the functional structure of a butyrylcholinesterase variant include the cysteine residues ⁶⁵Cys-⁹²Cys, ²⁵²Cys⁻²⁶³Cys, and ⁴⁰⁰Cys⁻⁵¹⁹Cys involved in intrachain disulfide bonds. A functional fragment can include non-peptidic structural elements that serve to mimic structurally or functionally important residues of the reference variant.

[0064] Also included as butyrylcholinesterase variants of the invention are fusion proteins that result from linking a butyrylcholinesterase variant or functional fragment thereof to a heterologous protein, such as a therapeutic protein, as well as fusion constructs of nucleic acids encoding such fusion proteins. Fragments of nucleic acids that can hybridize to a butyrylcholinesterase variant or functional fragment thereof are useful, for example, as hybridization probes and are also encompassed by the claimed invention.

[0065] The invention further provides butyrylcholinesterase variants, or functional fragment thereof, that contains an antibody or antibody fragment. A butyrylcholinesterase variant of the invention can be fused to any antibody or antibody fragment. For example, a butyrylcholinesterase variant of the invention can be fused to an antibody or antibody fragment that binds to a tumor-associated antigen. In this way the butyrylcholinesterase variant can be delivered directly to a tumor which can result in a decreased number of side effects. Several antigens are known to be over-expressed in tumor cells or expressed exclusively in tumor cells. These tumor associated antigens include, for example, Lewis Y (Siegall, C., Semin. Cancer Biol. 6: 289-295 (1995)), carcinoembryonic antigen (CEA)(Watine et al., Dis. Colon Rectum 44: 1791-1799 (2001)), tetraspanin L6 (Kaneko et al., Am. J. Gastroenterol. 96: 3457-3458 (2001)), 17-1A (Indar et al., J.R. Coll. Surg. Edinb. 47: 458-474 (2002)), mucin-1 (MUC-1) (Segal-Eiras and Croce, Allerg. Immunopath. 25: 176-181 (1997)), epidermal growth factor receptor (EGFR) (Bookman, M., Semin. Oncol. 25: 381-396 (1998)), cancer antigen 125 (CA 125) (Cherry and Vacchiano, Semin. Oncol. Nurs. 18: 167-173 (2002)), p97 (Srivastava, P., Curr. Opin. Immunol. 3: 654-658 (1991)), melanoma antigen gene (MAGE) (Barker and Salehi, J. Neurosci. Res. 67: 705-712 (2002)), CD20 (Kosmas et al., Leukemia 16: 2004-2015 (2002)), CD33 (Countouriotis et al., Stem Cells 20: 215-229 (2002)), ganglioside GD2 (Ragupathi, G., Cancer Immunol. Imunother. 43: 152-157 (1996)), and ganglioside GD3 (Ragupathi, G., supra (1996)).

[0066] A butyrylcholinesterase variant of the invention can be fused to an internalizing antibody or antibody fragment or a non-internalizing antibody or antibody fragment. When fused to a non-internalizing antibody or antibody fragment, the butyrylcholinesterase variant can be internalized through binding to a cell surface polypeptide that undergoes internalization. For example, a butyrylcholinesterase variant of the invention can be fused to an antibody directed to a receptor that undergoes internalization.

[0067] The invention provides a butyrylcholinesterase variant where the antibody or antibody fragment specifically binds a cell surface receptor. In one embodiment, the invention provides a butyrylcholinesterase variant where the antibody or antibody fragment specifically binds epidermal growth factor receptor (EGFR). The EGFR is known to be up-regulated in several tumor cell types, for example, in breast cancer cells. In various related embodiments, the invention provides a butyrylcholinesterase variant where the antibody or antibody fragment contains an amino acid sequence selected from a linker variant, hinge variant, and a synthetic linker variant. In one embodiment, the invention provides a butyrylcholinesterase variant where the antibody or antibody fragment contains an amino acid sequence as set forth in SEQ ID NOS: 18 and 20. ELISA results using a model antibody are shown in FIG. 7 and FIG. 8.

[0068] In a further embodiment, the invention provides a butyrylcholinesterase variant where the antibody or antibody fragment specifically binds CD20. CD20 is a non-glycosylated phosphoprotein on the B-cell surface. CD20-antibody complexes do not internalize, thereby allowing cell-surface bound immunoglobulin to interact with effector cells or complement for a longer time. In one embodiment, the invention provides a butyrylcholinesterase variant where the antibody or antibody fragment contains an amino acid sequence as set forth in SEQ ID NOS: 198 and 200, and specifically binds CD20. CD20 is known to be up-regulated in several tumor cell types, for example, B cell lymphomas such as Non-Hodgkin's lymphoma as well in various autoimmune conditions.

[0069] Fusions between a butyrylcholinesterase variant and an antibody or antibody fragment can be used for targeted tumor cell-specific butyrylcholoinesterase mediated toxicity using a process called antibody-directed enzyme prodrug therapy (ADEPT) (Jung, M., Mini Rev. Med. Chem. 1: 399-407 (2001); Bagshawe, K. D., Mol. Med. Today 1: 424-431 (1995); and Senter, P. D., FASEB J 4: 188-193 (1990)). A related method called viral-directed enzyme prodrug therapy (VDEPT) can also be utilized. An example of a fusion between a butyrylcholinesterase variant and an antibody or antibody fragment that can be used for targeted tumor cell-specific butyrylcholoinesterase mediated toxicity is set forth as amino acid sequence designated SEQ ID NO: 202 and corresponding nucleotide sequence set forth as SEQ ID NO: 201, which corresponds to an anti-CD20 VH-CH1 hinge cys L530 BChE.4-1 heavy chain construct. The butyrylcholinesterase variant designated SEQ ID NO: 202 is a fusion protein that contains a heavy chain comprised of the anti-CD20 antibody variable heavy chain region with a cysteine-containing hinge region and the L530 functional fragment (SEQ ID NO: 204) of the butyrylcholinesterase variant designated SEQ ID NO: 180, which incorporates the 4-1 variant amino acids (H77F/F227A/P285N/V331A). VDEPT uses a viral vector to deliver an enzyme such as a butyrylcholinesterase variant of the invention. With such approaches, selective expression of an enzyme can efficiently activate non-toxic or moderately toxic prodrugs in tumor cells into highly toxic metabolic products resulting in enhanced anti-tumor activity and an improved therapeutic index. In order for these approaches to be successful the enzyme needs to be of high activity, for example, the butyrylcholinesterase variants of the invention can be used.

[0070] The butyrylcholinesterase variants of the invention were derived from libraries as disclosed in Example I. A library that is sufficiently diverse to contain a butyrylcholinesterase variant with enhanced camptothecin conversion or hydrolysis activity can be prepared by a variety of methods well known in the art. Those skilled in the art will know what size and diversity is necessary or sufficient for the intended purpose. For example, a library of butyrylcholinesterase variants can be prepared that contains each of the 19 amino acids not found in the reference butyrylcholinesterase at each of the approximately 573 amino acid positions and screening the resultant variant library for butyrylcholinesterase variants with enhanced camptothecin hydrolysis activity.

[0071] Alternatively, a focused library can be prepared utilizing the structural, biochemical and modeling information relating to butyrylcholinesterase as described herein. It is understood that any information relevant to the determination or prediction of residues or regions important for camptothecin conversion or hydrolysis activity or structural function of butyrylcholinesterase can be useful in the design of a focused library of butyrylcholinesterase variants of the invention that have enhanced camptothecin hydrolysis activity. Thus, the butyrylcholinesterase variants that make up the library of butyrylcholinesterase variants of the invention can contain amino acid alterations at amino acid positions located in regions determined or predicted to be important for camptothecin conversion or hydrolysis activity. A focused library of butyrylcholinesterase variants can be desirable as it significantly decreases the number of variants that need to be screened in order to identify a butyrylcholinesterase variant with enhanced activity by targeting amino acid alterations to regions determined or predicted to be important for activity.

[0072] Regions important for camptothecin conversion or hydrolysis activity of butyrylcholinesterase can be determined or predicted through a variety of methods known in the art and used to focus the synthesis of a library of butyrylcholinesterase variants. Related enzymes such as, for example, acetylcholinesterase and carboxylesterase, that share a high degree of sequence similarity and have biochemically similar catalytic properties can provide information regarding the regions important for catalytic activity of butyrylcholinesterase. For example, structural modeling can reveal the active site of an enzyme, which is a three-dimensional structure such as a cleft, gorge or crevice formed by amino acid residues generally located apart from each other in primary structure. Therefore, amino acid residues that make up regions of butyrylcholinesterase important for camptothecin conversion or hydrolysis activity can include residues located along the active site gorge. For a description of structural modeling of butyrylcholinesterase, see for example, Harel et al., Proc. Nat. Acad. Sci. USA 89: 10827-10831 (1992) and Soreq et al., Trends Biochem. Sci. 17(9): 353-358 (1992), which are incorporated herein by reference.

[0073] In addition to structural modeling of butyrylcholinesterase, biochemical data can be used to determine or predict regions of butyrylcholinesterase important for camptothecin conversion or hydrolysis activity when preparing a focused library of butyrylcholiesterase variants. In this regard, the characterization of naturally occurring butyrylcholinesterase variants with altered camptothecin conversion or hydrolysis activity is useful for identifying regions important for the catalytic activity of butyrylcholinesterase. Similarly, site-directed mutagenesis studies can provide data regarding catalytically important amino acid residues as reviewed, for example, in Schwartz et al., Pharmac. Ther. 67: 283-322 (1992), which is incorporated by reference.

[0074] To generate a library of butyrylcholinesterase variants of the invention distinct types of information can be used alone or combined to determine or predict a region of an amino acid sequence of butyrylcholinesterase important for camptothecin conversion or hydrolysis activity. For example, information based on structural modeling and biochemical data is combined to determine a region of an amino acid sequence of butyrylcholinesterase important for camptothecin conversion or hydrolysis activity. Because information obtained by a variety of methods can be combined to predict the catalytically active regions, one skilled in the art will appreciate that the regions themselves represent approximations rather than strict confines. As a result, a library of butyrylcholinesterases can contain butyrylcholinesterase variants that have amino acid alterations outside of the regions determined or predicted to be important for camptothecin conversion or hydrolysis activity. Similarly, a butyrylcholinesterase variant of the invention can have amino acid alterations outside of the regions determined or predicted to be important for camptothecin conversion or hydrolysis activity. Furthermore, a butyrylcholinesterase variant of the invention can have any other modification that does not significantly change its camptothecin conversion or hydrolysis activity. It is further understood that the number of regions determined or predicted to be important for camptothecin conversion or hydrolysis activity can vary based on the predictive methods used.

[0075] Once a number of regions has been identified by any method appropriate for determination of regions important for camptothecin hydrolysis, or combination thereof, each region can be randomized across some or all amino acid positions to create a library of variants containing the wild-type amino acid plus one or more of the other nineteen naturally occurring amino acids at one or more positions within each of the regions. Seven regions of an amino acid sequence of butyrylcholinesterase selected for the focused library of butyrylcholinesterase variants provided by the invention are shown in Table 1.

TABLE 1
Butyrylcholinesterase Regions Predicted to be Important for
Catalytic Efficiency.

| Region | Location | Length |
|---|---|---|
| 1 | 68-82 | 15 |
| 2 | 110-121 | 12 |
| 3 | 194-201 | 8 |
| 4 | 224-234 | 11 |
| 5 | 277-289 | 13 |
| 6 | 327-332 | 6 |
| 7 | 429-442 | 14 |

[0076] Methods for preparing libraries containing diverse populations of various types of molecules such as peptides, peptoids and peptidomimetics are well known in the art (see, for example, Ecker and Crooke, Biotechnology 13: 351-360 (1995), and Blondelle et al., Trends Anal. Chem. 14: 83-92 (1995), and the references cited therein, each of which is incorporated herein by reference; see, also, Goodman and Ro, Peptidomimetics for Drug Design, in “Burger's Medicinal Chemistry and Drug Discovery” Vol. 1 (ed. M. E. Wolff; John Wiley & Sons 1995), pages 803-861, and Gordon et al., J. Med. Chem. 37: 1385-1401 (1994), each of which is incorporated herein by reference). Where a molecule is a peptide, protein or fragment thereof, the molecule can be produced in vitro directly or can be expressed from a nucleic acid, which can be produced in vitro. Methods of synthetic peptide chemistry are well known in the art.

[0077] A library of butyrylcholinesterase variants can be produced, for example, by constructing a nucleic acid expression library encoding butyrylcholinesterase variants. Methods for producing such libraries are well known in the art (see, for example, Sambrook et al., Molecular Cloning: A Laboratory Manual (Cold Spring Harbor Laboratory Press 1989), which is incorporated herein by reference). A library of nucleic acids encoding butyrylcholinesterase variants can be composed of DNA, RNA or analogs thereof. A library containing RNA molecules can be constructed, for example, by synthesizing the RNA molecules chemically.

[0078] The generation of a library of nucleic acids encoding butyrylcholinesterase variants can be by any means desired by the user. Those skilled in the art will know what methods can be used to generate libraries of nucleic acids encoding butyrylcholinesterase variants. For example, butyrylcholinesterase variants can be generated by mutagenesis of nucleic acids encoding butyrylcholinesterase using methods well known to those skilled in the art (Molecular Cloning: A Laboratory Manual, Sambrook et al., eds., Cold Spring Harbor Press, Plainview, N.Y. (1989)). A library of nucleic acids encoding butyrylcholinesterase variants of the invention can be randomized to be sufficiently diverse to contain nucleic acids encoding every possible naturally occurring amino acid at each amino acid position of butyrylcholinesterase. Alternatively, a library of nucleic acids can be prepared such that it contains nucleic acids encoding every possible naturally occuring amino acid at each amino acid only at positions located within a region of butyrylcholinesterase predicted or determined to be important for camptothecin conversion or hydrolysis activity.

[0079] One or more mutations can be introduced into a nucleic acid molecule encoding a butyrylcholinesterase variant to yield a modified nucleic acid molecule using, for example, site-directed mutagenesis (see Wu (Ed.), Meth. In Enzymol. Vol. 217, San Diego: Academic Press (1993); Higuchi, “Recombinant PCR” in Innis et al. (Ed.), PCR Protocols, San Diego: Academic Press, Inc. (1990), each of which is incorporated herein by reference). Such mutagenesis can be used to introduce a specific, desired amino acid alteration. Thus, distinct libraries containing amino acid alterations in one or more of the regions determined to be important for camptothecin conversion or hydrolysis activity as well as a single library containing mutations in several or all of the regions can be prepared.

[0080] The efficient synthesis and expression of libraries of butyrylcholinesterase variants using oligonucleotide-directed mutagenesis can be accomplished as previously described by Wu et al., Proc. Natl. Acad. Sci. USA, 95: 6037-6042 (1998); Wu et al., J. Mol. Biol., 294: 151-162 (1999); and Kunkel, Proc. Natl. Acad. Sci. USA, 82: 488-492 (1985), which are incorporated herein by reference. Oligonucleotide-directed mutagenesis is a well-known and efficient procedure for systematically introducing mutations, independent of their phenotype and is, therefore, ideally suited for directed evolution approaches to protein engineering. To perform oligonucleotide-directed mutagenesis a library of nucleic acids encoding the desired mutations is hybridized to single-stranded uracil-containing template of the wild-type sequence. The methodology is flexible, permitting precise mutations to be introduced without the use of restriction enzymes, and is relatively inexpensive if oligonucleotides are synthesized using codon-based mutagenesis.

[0081] Codon-based synthesis or mutagenesis represents one method well known in the art for avoiding genetic redundancy while rapidly and efficiently producing a large number of alterations in a known amino acid sequence or for generating a diverse population of random sequences. This method is the subject matter of U.S. Pat. Nos. 5,264,563 and 5,523,388 and is also described in Glaser et al. J. Immunology 149: 3903-3913 (1992). Briefly, coupling reactions for the randomization of, for example, all twenty codons which specify the amino acids of the genetic code are performed in separate reaction vessels and randomization for a particular codon position occurs by mixing the products of each of the reaction vessels. Following mixing, the randomized reaction products corresponding to codons encoding an equal mixture of all twenty amino acids are then divided into separate reaction vessels for the synthesis of each randomized codon at the next position. If desired, equal frequencies of all twenty amino acids can be achieved with twenty vessels that contain equal portions of the twenty codons. Thus, it is possible to utilize this method to generate random libraries of the entire sequence of butyrylcholinesterase or focused libraries of the regions determined or predicted to be important for camptothecin conversion or hydrolysis activity.

[0082] Variations to the above synthesis method also exist and include, for example, the synthesis of predetermined codons at desired positions and the biased synthesis of a predetermined sequence at one or more codon positions as described by Wu et al, supra, 1998. Biased synthesis involves the use of two reaction vessels where the predetermined or parent codon is synthesized in one vessel and the random codon sequence is synthesized in the second vessel. The second vessel can be divided into multiple reaction vessels such as that described above for the synthesis of codons specifying totally random amino acids at a particular position. Alternatively, a population of degenerate codons can be synthesized in the second reaction vessel such as through the coupling of NNG/T nucleotides or NNX/X where N is a mixture of all four nucleotides. Following synthesis of the predetermined and random codons, the reaction products in each of the two reaction vessels are mixed and then redivided into an additional two vessels for synthesis at the next codon position.

[0083] A modification to the above-described codon-based synthesis for producing a diverse number of variant sequences can similarly be employed for the production of the libraries of butyrylcholinesterase variants described herein. This modification is based on the two vessel method described above which biases synthesis toward the parent sequence and allows the user to separate the variants into populations containing a specified number of codon positions that have random codon changes.

[0084] Briefly, this synthesis is performed by continuing to divide the reaction vessels after the synthesis of each codon position into two new vessels. After the division, the reaction products from each consecutive pair of reaction vessels, starting with the second vessel, is mixed. This mixing brings together the reaction products having the same number of codon positions with random changes. Synthesis proceeds by then dividing the products of the first and last vessel and the newly mixed products from each consecutive pair of reaction vessels and redividing into two new vessels. In one of the new vessels, the parent codon is synthesized and in the second vessel, the random codon is synthesized. For example, synthesis at the first codon position entails synthesis of the parent codon in one reaction vessel and synthesis of a random codon in the second reaction vessel. For synthesis at the second codon position, each of the first two reaction vessels is divided into two vessels yielding two pairs of vessels. For each pair, a parent codon is synthesized in one of the vessels and a random codon is synthesized in the second vessel. When arranged linearly, the reaction products in the second and third vessels are mixed to bring together those products having random codon sequences at single codon positions. This mixing also reduces the product populations to three, which are the starting populations for the next round of synthesis. Similarly, for the third, fourth and each remaining position, each reaction product population for the preceding position are divided and a parent and random codon synthesized.

[0085] Following the above modification of codon-based synthesis, populations containing random codon changes at one, two, three and four positions as well as others can be conveniently separated out and used based on the need of the individual. Moreover, this synthesis scheme also allows enrichment of the populations for the randomized sequences over the parent sequence since the vessel containing only the parent sequence synthesis is similarly separated out from the random codon synthesis.

[0086] This method can be used to synthesize a library of nucleic acids encoding butyrylcholinesterase variants having amino acid alterations in one or more regions of butyrylcholinesterase predicted to be important for camptothecin conversion or hydrolysis activity.

[0087] Alternatively, a library of nucleic acids encoding butyrylcholinesterase variants can also be generated using gene shuffling. Gene shuffling or DNA shuffling is a method for directed evolution that generates diversity by recombination (see, for example, Stemmer, Proc. Natl. Acad. Sci. USA 91: 10747-10751 (1994); Stemmer, Nature 370: 389-391 (1994); Crameri et al., Nature 391: 288-291 (1998); Stemmer et al., U.S. Pat. No. 5,830,721, issued Nov. 3, 1998). Gene shuffling or DNA shuffling is a method using in vitro homologous recombination of pools of selected mutant genes. For example, a pool of point mutants of a particular gene can be used. The genes are randomly fragmented, for example, using DNase, and reassembled by PCR. If desired, DNA shuffling can be carried out using homologous genes from different organisms to generate diversity (Crameri et al., supra, 1998). The fragmentation and reassembly can be carried out in multiple rounds, if desired. The resulting reassembled genes constitute a library of butyrylcholinesterase variants that can be used in the invention compositions and methods.

[0088] The invention library of nucleic acids encoding butyrylcholinesterase variants can be expressed in a variety of eukaryotic cells. For example, the nucleic acids can be expressed in mammalian cells, insect cells, plant cells, and non-yeast fungal cells. Mammalian cell lines useful for expressing the invention library of nucleic acids encoding butyrylcholinesterase variants include, for example, Chinese Hamster Ovary (CHO), human 293T and Human NIH 3T3 cell lines. Expression of the invention library of nucleic acids encoding butyrylcholinesterase variants can be achieved by both stable or transient cell transfection (see Example III, Table 5).

[0089] The incorporation of variant nucleic acids or heterologous nucleic acid fragments at an identical site in the genome functions to create isogenic cell lines that differ only in the expression of a particular variant or heterologous nucleic acid. Incorporation at a single site minimizes positional effects from integration at multiple sites in a genome that affect transcription of the mRNA encoded by the nucleic acid and complications from the incorporation of multiple copies or expression of more than one nucleic acid species per cell. Techniques known in the art that can be used to target a variant or a heterologous nucleic acid to a specific location in the genome include, for example, homologous recombination, retroviral targeting and recombinase-mediated targeting.

[0090] One approach for targeting variant or heterologous nucleic acids to a single site in the genome uses Cre recombinase to target insertion of exogenous DNA into the eukaryotic genome at a site containing a site specific recombination sequence (Sauer and Henderson, Proc. Natl. Acad. Sci. USA, 85: 5166-5170 (1988); Fukushige and Sauer, Proc. Natl. Acad. Sci. U.S.A. 89: 7905-7909 (1992); Bethke and Sauer, Nuc. Acids Res., 25: 2828-2834 (1997)). In addition to Cre recombinase, Flp recombinase can also be used to target insertion of exogenous DNA into a particular site in the genome (Dymecki, Proc. Natl. Acad. Sci. U.S.A. 93: 6191-6196 (1996)). It is understood that any combination of site-specific recombinase and corresponding recombination site can be used in methods of the invention to target a nucleic acid to a particular site in the genome.

[0091] A suitable recombinase can be encoded on a vector that is co-transfected with a vector containing a nucleic acid encoding a butyrylcholinesterase variant. Alternatively, the expression element of a recombinase can be incorporated into the same vector expressing a nucleic acid encoding a butyrylcholinesterase variant. In addition to simultaneously transfecting the nucleic acid encoding a recombinase with the nucleic acids encoding a butyrylcholinesterase variant, a vector encoding the recombinase can be transfected into a cell, and the cells can be selected for expression of recombinase. A cell stably expressing the recombinase can subsequently be transfected with nucleic acids encoding variant nucleic acids.

[0092] The precise site-specific DNA recombination mediated by Cre recombinase can be used to create stable mammalian transformants containing a single copy of exogenous DNA encoding a butyrylcholinesterase variant. As exemplified below, the frequency of Cre-mediated targeting events can be enhanced substantially using a modified doublelox strategy. The doublelox strategy is based on the observation that certain nucleotide changes within the core region of the lox site alter the site selection specificity of Cre-mediated recombination with little effect on the efficiency of recombination (Hoess et al., Nucleic Acids Res. 14: 2287-2300 (1986)). Incorporation of loxP and an altered loxP site, termed lox511, in both the targeting vector and the host cell genome results in site-specific recombination by a double crossover event. The doublelox approach increases the recovery of site-specific integrants by 20-fold over the single crossover insertional recombination, increasing the absolute frequency of site-specific recombination such that it exceeds the frequency of illegitimate recombination (Bethke and Sauer, Nuc. Acids Res., 25: 2828-2834 (1997)).

[0093] Following the expression of a library of butyrylcholinesterase variants in a mammalian cell line, randomly selected clones can be sequenced and screened for increased catalytic activity. Methods for sequencing selected clones are well known to those of skill in the art and are described, for example, in Sambrook et al., supra, 1992, and in Ansubel et al., supra, 1998. Selecting a suitable method for measuring the camptothecin conversion or hydrolysis activity of a butyrylcholinesterase variant depends on a variety of factors such as, for example, the amount of the butyrylcholinesterase variant that is available. The camptothecin conversion or hydrolysis activity activity of a butyrylcholinesterase variant can be measured, for example, by spectrophotometry, by a microtiter-based assay utilizing a polyclonal anti-butyrylcholinesterase antibody to uniformly capture the butyrylcholinesterase variants and by high-performance liquid chromatography (HPLC).

[0094] Enhanced camptothecin conversion or hydrolysis activity of a butyrylcholinesterase variant compared to butyrylcholinesterase can be determined by a comparison of catalytic efficiencies as determined using assays known in the art and described herein. For example, the camptothecin conversion or hydrolysis activity of a butyrylcholinesterase variant can be determined using an o-nitrophenyl acetate hydrolysis assay (see Example II), a CPT-11 conversion to SN-38 HPLC assay (see Example III), or a cytotoxicity assay (see Example IV). To ensure that a library of butyrylcholinesterase variants has been screened exhaustively, screening of each library can be continued until clones encoding identical butyrylcholinesterase amino acid alterations have been identified on multiple occasions.

[0095] Clones expressing a butyrylcholinesterase variant with increased camptothecin hydrolysis activity can be used to established larger-scale cultures suitable for purifying larger quantities of the butyrylcholinesterase. A butyrylcholinesterase variant of interest can be cloned into an expression vector and used to transfect a cell line, which can subsequently be expanded. Those skilled in the art will know what type of expression vector is suitable for a particular application. A butyrylcholinesterase variant exhibiting increased camptothecin conversion or hydrolysis activity can be cloned, for example, into an expression vector carrying a gene that confers resistance to a particular chemical agent to allow positive selection of the transfected cells. An expression vector suitable for transfection of, for example, mammalian cell lines can contain a promoter such as the cytomegalovirus (CMV) promoter for selection in mammalian cells. As desribed herein, a butyrylcholinesterase variant can be cloned into a mammalian expression vector and transiently transfected into human 293T cells. Expression vectors suitable for expressing a butyrylcholinesterase variant are well known in the art and commercially available.

[0096] Clones expressing butyrylcholinesterase variants can be selected and tested for camptothecin conversion or hydrolysis activity. Cells carrying clones exhibiting enhanced camptothecin conversion or hydrolysis activity can be expanded by routine cell culture systems to produce larger quantities of a butyrylcholinesterase variant of interest. The concentrated recombinant butyrylcholinesterase variant can be harvested and purified by methods well known in the art and described, for example, by Masson et al., Biochemistry 36: 2266-2277 (1997), which is incorporated herein by reference.

[0097] A butyrylcholinesterase variant having an increased serum half-life can be useful for testing a butyrylcholinesterase variant in a subject or treating cancer in an individual. Useful methods for increasing the serum half-life of a butyrylcholinesterase variant include, for example, conversion of the butyrylcholinesterase variant into a tetramer, covalently attaching synthetic and natural polymers such as polyethylene glycol (PEG) and dextrans to the truncated butyrylcholinesterase variant, liposome formulations, or expression of the enzyme as an Ig-fusion protein. As disclosed herein, conversion of a butyrylcholineserase variant into a tetramer can be achieved by co-transfecting the host cell line with the COLQ gene as well as by addition of poly-L-proline to the media of transfected cells. These and other methods known in the art for increasing the serum half-life of a butyrylcholinesterase variant are useful for testing a butyrylcholinesterase variant in an animal subject or treating cancer in an individual.

[0098] The invention provides a method of converting a camptothecin derivative to a topoisomerase inhibitor by contacting the camptothecin derivative with a butyrylcholinesterase variant selected from SEQ ID NOS: 2, 4, 6, 8, 10, 12, 14, 24, 26, 28, 30, 32, 34, 36, 38, 40, 42, 44, 46, 48, 50, 52, 54, 56, 58, 60, 62, 64, 66, 68, 70, 72, 74, 76, 78, 80, 82, 84, 86, 88, 90, 92, 94, 96, 98, 100, 102, 104, 106, 108, 110, 112, 114, 116, 118, 120, 122, 124, 126, 128, 130, 132, 134, 136, 138, 140, 142, 144, 146, 148, 150, 152, 154, 156, 158, 160, 162, 164, 166, 168, 170, 172, 174, 176, 178, 180, 182, 184, 186, 188, 190, 192, 194, and 196, or functional fragment thereof, under conditions that allow conversion of a camptothecin derivative to a topoisomerase inhibitor. In one embodiment the topoisomerase inhibitor is SN-38. In a further embodiment the camptothecin derivative is CPT-11. In one embodiment, the butyrylcholinesterase variant exhibits a two-fold or greater increase in conversion capability compared to butyrylcholinesterase, a ten-fold or greater increase in conversion capability compared to butyrylcholinesterase or a fifty-fold or more enhanced conversion capability compared to butyrylcholinesterase, a one hundred-fold or more enhanced conversion capability compared to butyrylcholinesterase, a two hundred-fold or more enhanced conversion capability compared to butyrylcholinesterase, a three hundred-fold or more enhanced conversion capability compared to butyrylcholinesterase. a four hundred-fold or more enhanced conversion capability compared to butyrylcholinesterase, a five hundred-fold or more enhanced conversion capability compared to butyrylcholinesterase, a one thousand-fold or more enhanced conversion capability compared to butyrylcholinesterase, a fifteen hundred-fold or more enhanced conversion capability compared to butyrylcholinesterase, a two thousand-fold or more enhanced conversion capability compared to butyrylcholinesterase, a three thousand-fold or more enhanced conversion capability compared to butyrylcholinesterase.

[0099] In one embodiment, the invention provides a method of converting a camptothecin derivative to a topoisomerase inhibitor by contacting the camptothecin derivative with a butyrylcholinesterase variant having the sequence as shown in SEQ ID NOS: 2, 4, 6, 8, 10, 12, 14, 24, 26, 28, 30, 32, 34, 36, 38, 40, 42, 44, 46, 48, 50, 52, 54, 56, 58, 60, 62, 64, 66, 68, 70, 72, 74, 76, 78, 80, 82, 84, 86, 88, 90, 92, 94, 96, 98, 100, 102, 104, 106, 108, 110, 112, 114, 116, 118, 120, 122, 124, 126, 128, 130, 132, 134, 136, 138, 140, 142, 144, 146, 148, 150, 152, 154, 156, 158, 160, 162, 164, 166, 168, 170, 172, 174, 176, 178, 180, 182, 184, 186, 188, 190, 192, 194, and 196, or functional fragment thereof, under conditions that allow conversion of a camptothecin derivative to a topoisomerase inhibitor. For example, in one embodiment the invention provides a method of converting a camptothecin derivative to a topoisomerase inhibitor by contacting the camptothecin derivative with a butyrylcholinesterase variant having the amino acid sequence as shown in SEQ ID NO: 2, or functional fragment thereof, under conditions that allow conversion of a camptothecin derivative to a topoisomerase inhibitor. In another embodiment, the butyrylcholinesterase variant has the amino acid sequence as shown in SEQ ID NO: 4, or functional fragment thereof. In a further embodiment, the butyrylcholinesterase variant has the amino acid sequence as shown in SEQ ID NO: 6, or functional fragment thereof. In a still further embodiment, the butyrylcholinesterase variant has the amino acid sequence as shown in SEQ ID NO: 8, or functional fragment thereof. In another embodiment, the butyrylcholinesterase variant has the amino acid sequence as shown in SEQ ID NO: 10, or functional fragment thereof. In a further embodiment, the butyrylcholinesterase variant has the amino acid sequence as shown in SEQ ID NO: 12, or functional fragment thereof. In another embodiment, the butyrylcholinesterase variant has the amino acid sequence as shown in SEQ ID NO: 14, or functional fragment thereof. In another embodiment, the butyrylcholinesterase variant has the amino acid sequence as shown in SEQ ID NO: 24, or functional fragment thereof. In another embodiment, the butyrylcholinesterase variant has the amino acid sequence as shown in SEQ ID NO: 26, or functional fragment thereof. In another embodiment, the butyrylcholinesterase variant has the amino acid sequence as shown in SEQ ID NO: 28, or functional fragment thereof. In another embodiment, the butyrylcholinesterase variant has the amino acid sequence as shown in SEQ ID NO: 30, or functional fragment thereof. In another embodiment, the butyrylcholinesterase variant has the amino acid sequence as shown in SEQ ID NO: 32, or functional fragment thereof. In another embodiment, the butyrylcholinesterase variant has the amino acid sequence as shown in SEQ ID NO: 34, or functional fragment thereof. In another embodiment, the butyrylcholinesterase variant has the amino acid sequence as shown in SEQ ID NO: 36, or functional fragment thereof. In another embodiment, the butyrylcholinesterase variant has the amino acid sequence as shown in SEQ ID NO: 38, or functional fragment thereof. In another embodiment, the butyrylcholinesterase variant has the amino acid sequence as shown in SEQ ID NO: 40, or functional fragment thereof. In another embodiment, the butyrylcholinesterase variant has the amino acid sequence as shown in SEQ ID NO: 42, or functional fragment thereof. In another embodiment, the butyrylcholinesterase variant has the amino acid sequence as shown in SEQ ID NO: 44, or functional fragment thereof. In another embodiment, the butyrylcholinesterase variant has the amino acid sequence as shown in SEQ ID NO: 46, or functional fragment thereof. In another embodiment, the butyrylcholinesterase variant has the amino acid sequence as shown in SEQ ID NO: 48, or functional fragment thereof. In another embodiment, the butyrylcholinesterase variant has the amino acid sequence as shown in SEQ ID NO: 50, or functional fragment thereof. In another embodiment, the butyrylcholinesterase variant has the amino acid sequence as shown in SEQ ID NO: 52, or functional fragment thereof. In another embodiment, the butyrylcholinesterase variant has the amino acid sequence as shown in SEQ ID NO: 54, or functional fragment thereof. In another embodiment, the butyrylcholinesterase variant has the amino acid sequence as shown in SEQ ID NO: 56, or functional fragment thereof. In another embodiment, the butyrylcholinesterase variant has the amino acid sequence as shown in SEQ ID NO: 58, or functional fragment thereof. In another embodiment, the butyrylcholinesterase variant has the amino acid sequence as shown in SEQ ID NO: 60, or functional fragment thereof. In another embodiment, the butyrylcholinesterase variant has the amino acid sequence as shown in SEQ ID NO: 62, or functional fragment thereof. In another embodiment, the butyrylcholinesterase variant has the amino acid sequence as shown in SEQ ID NO: 64, or functional fragment thereof. In another embodiment, the butyrylcholinesterase variant has the amino acid sequence as shown in SEQ ID NO: 66, or functional fragment thereof. In another embodiment, the butyrylcholinesterase variant has the amino acid sequence as shown in SEQ ID NO: 68, or functional fragment thereof. In another embodiment, the butyrylcholinesterase variant has the amino acid sequence as shown in SEQ ID NO: 70, or functional fragment thereof. In another embodiment, the butyrylcholinesterase variant has the amino acid sequence as shown in SEQ ID NO: 72, or functional fragment thereof. In another embodiment, the butyrylcholinesterase variant has the amino acid sequence as shown in SEQ ID NO: 74, or functional fragment thereof. In another embodiment, the butyrylcholinesterase variant has the amino acid sequence as shown in SEQ ID NO: 76, or functional fragment thereof. In another embodiment, the butyrylcholinesterase variant has the amino acid sequence as shown in SEQ ID NO: 78, or functional fragment thereof. In another embodiment, the butyrylcholinesterase variant has the amino acid sequence as shown in SEQ ID NO: 80, or functional fragment thereof. In another embodiment, the butyrylcholinesterase variant has the amino acid sequence as shown in SEQ ID NO: 82, or functional fragment thereof. In another embodiment, the butyrylcholinesterase variant has the amino acid sequence as shown in SEQ ID NO: 84, or functional fragment thereof. In another embodiment, the butyrylcholinesterase variant has the amino acid sequence as shown in SEQ ID NO: 86, or functional fragment thereof. In another embodiment, the butyrylcholinesterase variant has the amino acid sequence as shown in SEQ ID NO: 88, or functional fragment thereof. In another embodiment, the butyrylcholinesterase variant has the amino acid sequence as shown in SEQ ID NO: 90, or functional fragment thereof. In another embodiment, the butyrylcholinesterase variant has the amino acid sequence as shown in SEQ ID NO: 92, or functional fragment thereof. In another embodiment, the butyrylcholinesterase variant has the amino acid sequence as shown in SEQ ID NO: 94, or functional fragment thereof. In another embodiment, the butyrylcholinesterase variant has the amino acid sequence as shown in SEQ ID NO: 96, or functional fragment thereof. In another embodiment, the butyrylcholinesterase variant has the amino acid sequence as shown in SEQ ID NO: 98, or functional fragment thereof. In another embodiment, the butyrylcholinesterase variant has the amino acid sequence as shown in SEQ ID NO: 100, or functional fragment thereof. In another embodiment, the butyrylcholinesterase variant has the amino acid sequence as shown in SEQ ID NO: 102, or functional fragment thereof. In another embodiment, the butyrylcholinesterase variant has the amino acid sequence as shown in SEQ ID NO: 104, or functional fragment thereof. In another embodiment, the butyrylcholinesterase variant has the amino acid sequence as shown in SEQ ID NO: 106, or functional fragment thereof. In another embodiment, the butyrylcholinesterase variant has the amino acid sequence as shown in SEQ ID NO: 108, or functional fragment thereof. In another embodiment, the butyrylcholinesterase variant has the amino acid sequence as shown in SEQ ID NO: 110, or functional fragment thereof. In another embodiment, the butyrylcholinesterase variant has the amino acid sequence as shown in SEQ ID NO: 112, or functional fragment thereof. In another embodiment, the butyrylcholinesterase variant has the amino acid sequence as shown in SEQ ID NO: 114, or functional fragment thereof. In another embodiment, the butyrylcholinesterase variant has the amino acid sequence as shown in SEQ ID NO: 116, or functional fragment thereof. In another embodiment, the butyrylcholinesterase variant has the amino acid sequence as shown in SEQ ID NO: 118, or functional fragment thereof. In another embodiment, the butyrylcholinesterase variant has the amino acid sequence as shown in SEQ ID NO: 120, or functional fragment thereof. In another embodiment, the butyrylcholinesterase variant has the amino acid sequence as shown in SEQ ID NO: 122, or functional fragment thereof. In another embodiment, the butyrylcholinesterase variant has the amino acid sequence as shown in SEQ ID NO: 124, or functional fragment thereof. In another embodiment, the butyrylcholinesterase variant has the amino acid sequence as shown in SEQ ID NO: 126, or functional fragment thereof. In another embodiment, the butyrylcholinesterase variant has the amino acid sequence as shown in SEQ ID NO: 128, or functional fragment thereof. In another embodiment, the butyrylcholinesterase variant has the amino acid sequence as shown in SEQ ID NO: 130, or functional fragment thereof. In another embodiment, the butyrylcholinesterase variant has the amino acid sequence as shown in SEQ ID NO: 132, or functional fragment thereof. In another embodiment, the butyrylcholinesterase variant has the amino acid sequence as shown in SEQ ID NO: 134, or functional fragment thereof. In another embodiment, the butyrylcholinesterase variant has the amino acid sequence as shown in SEQ ID NO: 136, or functional fragment thereof. In another embodiment, the butyrylcholinesterase variant has the amino acid sequence as shown in SEQ ID NO: 138, or functional fragment thereof. In another embodiment, the butyrylcholinesterase variant has the amino acid sequence as shown in SEQ ID NO: 140, or functional fragment thereof. In another embodiment, the butyrylcholinesterase variant has the amino acid sequence as shown in SEQ ID NO: 142, or functional fragment thereof. In another embodiment, the butyrylcholinesterase variant has the amino acid sequence as shown in SEQ ID NO: 144, or functional fragment thereof. In another embodiment, the butyrylcholinesterase variant has the amino acid sequence as shown in SEQ ID NO: 146, or functional fragment thereof. In another embodiment, the butyrylcholinesterase variant has the amino acid sequence as shown in SEQ ID NO: 148, or functional fragment thereof. In another embodiment, the butyrylcholinesterase variant has the amino acid sequence as shown in SEQ ID NO: 150, or functional fragment thereof. In another embodiment, the butyrylcholinesterase variant has the amino acid sequence as shown in SEQ ID NO: 152, or functional fragment thereof. In another embodiment, the butyrylcholinesterase variant has the amino acid sequence as shown in SEQ ID NO: 154, or functional fragment thereof. In another embodiment, the butyrylcholinesterase variant has the amino acid sequence as shown in SEQ ID NO: 156, or functional fragment thereof. In another embodiment, the butyrylcholinesterase variant has the amino acid sequence as shown in SEQ ID NO: 158, or functional fragment thereof. In another embodiment, the butyrylcholinesterase variant has the amino acid sequence as shown in SEQ ID NO: 160, or functional fragment thereof. In another embodiment, the butyrylcholinesterase variant has the amino acid sequence as shown in SEQ ID NO: 162, or functional fragment thereof. In another embodiment, the butyrylcholinesterase variant has the amino acid sequence as shown in SEQ ID NO: 164, or functional fragment thereof. In another embodiment, the butyrylcholinesterase variant has the amino acid sequence as shown in SEQ ID NO: 166, or functional fragment thereof. In another embodiment, the butyrylcholinesterase variant has the amino acid sequence as shown in SEQ ID NO: 168, or functional fragment thereof. In another embodiment, the butyrylcholinesterase variant has the amino acid sequence as shown in SEQ ID NO: 170, or functional fragment thereof. In another embodiment, the butyrylcholinesterase variant has the amino acid sequence as shown in SEQ ID NO: 172, or functional fragment thereof. In another embodiment, the butyrylcholinesterase variant has the amino acid sequence as shown in SEQ ID NO: 174, or functional fragment thereof. In another embodiment, the butyrylcholinesterase variant has the amino acid sequence as shown in SEQ ID NO: 178, or functional fragment thereof. In another embodiment, the butyrylcholinesterase variant has the amino acid sequence as shown in SEQ ID NO: 180, or functional fragment thereof. In another embodiment, the butyrylcholinesterase variant has the amino acid sequence as shown in SEQ ID NO: 182, or functional fragment thereof. In another embodiment, the butyrylcholinesterase variant has the amino acid sequence as shown in SEQ ID NO: 184, or functional fragment thereof. In another embodiment, the butyrylcholinesterase variant has the amino acid sequence as shown in SEQ ID NO: 186, or functional fragment thereof. In another embodiment, the butyrylcholinesterase variant has the amino acid sequence as shown in SEQ ID NO: 188, or functional fragment thereof. In another embodiment, the butyrylcholinesterase variant has the amino acid sequence as shown in SEQ ID NO: 190, or functional fragment thereof. In another embodiment, the butyrylcholinesterase variant has the amino acid sequence as shown in SEQ ID NO: 192, or functional fragment thereof. In another embodiment, the butyrylcholinesterase variant has the amino acid sequence as shown in SEQ ID NO: 194, or functional fragment thereof. In another embodiment, the butyrylcholinesterase variant has the amino acid sequence as shown in SEQ ID NO: 196, or functional fragment thereof.

[0100] The invention also provides a method of converting a paxlitaxel prodrug to a paxlitaxel by contacting the paxlitaxel prodrug with a butyrylcholinesterase variant selected from SEQ ID NOS: 2, 4, 6, 8, 10, 12, 14, 24, 26, 28, 30, 32, 34, 36, 38, 40, 42, 44, 46, 48, 50, 32, 54, 56, 58, 60, 62, 64, 66, 68, 70, 72, 74, 76, 78, 80, 82, 84, 86, 88, 90, 92, 94, 96, 98, 100, 102, 104, 106, 108, 110, 112, 114, 116, 118, 120, 122, 124, 126, 128, 130, 132, 134, 136, 138, 140, 142, 144, 146, 148, 150, 152, 154, 156, 158, 160, 162, 164, 166, 168, 170, 172, 174, 176, 178, 180, 182, 184, 186, 188, 190, 192, 194, and 196, or functional fragment thereof, under conditions that allow conversion of a paxlitaxel prodrug to paxlitaxel. In one embodiment, the butyrylcholinesterase variant exhibits a two-fold or greater increase in conversion capability compared to butyrylcholinesterase, a ten-fold or greater increase in conversion capability compared to butyrylcholinesterase, a fifty-fold or more enhanced conversion capability compared to butyrylcholinesterase, a one hundred-fold or more enhanced conversion capability compared to butyrylcholinesterase, a two hundred-fold or more enhanced conversion capability compared to butyrylcholinesterase, a three hundred-fold or more enhanced conversion capability compared to butyrylcholinesterase, a four hundred-fold or more enhanced conversion capability compared to butyrylcholinesterase, a five hundred-fold or more enhanced conversion capability compared to butyrylcholinesteras, a one thousand-fold or more enhanced conversion capability compared to butyrylcholinesterase. a fifteen hundred-fold or more enhanced conversion capability compared to butyrylcholinesterase, a two thousand-fold or more enhanced conversion capability compared to butyrylcholinesterase, a three thousand-fold or more enhanced conversion capability compared to butyrylcholinesterase.

[0101] Paclitaxel prodrugs such as paclitaxel-2-ethylcarbonate (PC) have significant levels of antitumor activities in rodent models of human cancers. Paclitaxel (also known as TAXOL) was originally isolated from the bark of the Pacific yew tree and has been used in the treatment of several cancers including, for example, breast cancer, ovarian cancer, non-small cell lung cancer and Kaposi's sarcoma. The mechanism of action of this class of chemotherapeutic agents is the stabilization of tubulin. Serum carboxylesterases such as rat carboxylesterase has been shown to convert paclitaxel prodrugs, such as PC, to paxlitaxel. These serum carboxylesterases enhance the cytotoxic activity of PC on lung carcinoma and melanoma cell lines (Senter et al., Cancer Res. 56: 1471-1474 (1996)). Butyrylcholinesterase and butyrylcholinesterase variants of the invention can be used to convert paclitaxel prodrugs such as PC into active drugs useful for the treatment of cancer.

[0102] As described herein, a butyrylcholinesterase variant exhibiting increased camptothecin conversion or hydrolysis activity can convert or hydrolyze a substrate, such as a camptothecin derivative or paclitaxel, in vitro as well as in vivo. For example, a camptothecin derivative butyrylcholinesterase substrate can be contacted with a butyrylcholinesterase variant of the invention in vitro by adding the substrate to supernatant isolated from cultures of butyrylcholinesterase variant library clones. Alternatively, the butyrylcholinesterase variant can be purified prior to being contacted by the substrate. Appropriate medium conditions in which to contact a substrate such as a camptothecin derivative substrate with a butyrylcholinesterase variant of the invention are readily determined by those skilled in the art. As described below, butyrylcholinesterase variants from culture supernatants can further be immobilized using a capture agent, such as an antibody prior to being contacted with a substrate, which allows for removal of culture supernatant components and enables contacting of the immobilized variants with substrate in the absence of contaminants. Following contacting of a butyrylcholinesterase variant of the invention with a substrate, an activity of the variant enzyme can be measured. For example, after contacting a butyrylcholinesterase variant of the invention with a camptothecin derivative substrate, camptothecin conversion or hydrolysis activity can be measured by a variety of methods known in the art and described herein, such as high-performance liquid chromatography or a cytotoxicity assay.

[0103] The invention further provides a method of treating cancer by administering to an individual an effective amount of a butyrylcholinesterase variant selected from SEQ ID NOS: 2, 4, 6, 8, 10, 12, 14, 24, 26, 28, 30, 32, 34, 36, 38, 40, 42, 44, 46, 48, 50, 52, 54, 56, 58, 60, 62, 64, 66, 68, 70, 72, 74, 76, 78, 80, 82, 84, 86, 88, 90, 92, 94, 96, 98, 100, 102, 104, 106, 108, 110, 112, 114, 116, 118, 120, 122, 124, 126, 128, 130, 132, 134, 136, 138, 140, 142, 144, 146, 148, 150, 152, 154, 156, 158, 160, 162, 164, 166, 168, 170, 172, 174, 176, 178, 180, 182, 184, 186, 188, 190, 192, 194, and 196, or functional fragment thereof, exhibiting increased capability to convert a camptothecin derivative to a topoisomerase inhibitor compared to butyrylcholinesterase. In one embodiment, the cancer is metastatic colorectal cancer. In another embodiment the cancer is ovarian cancer. In a further embodiment the cancer is lung cancer, for example, small cell lung cancer or non-small cell lung cancer. In a still further embodiment the cancer is non-Hodgkin's lymphoma. In another embodiment, the cancer is a central nervous system cancer.

[0104] The invention also provides a method of treating cancer by administering to an individual an effective amount of a butyrylcholinesterase variant selected from SEQ ID NOS: 2, 4, 6, 8, 10, 12, 14, 24, 26, 28, 30, 32, 34, 36, 38, 40, 42, 44, 46, 48, 50, 52, 54, 56, 58, 60, 62, 64, 66, 68, 70, 72, 74, 76, 78, 80, 82, 84, 86, 88, 90, 92, 94, 96, 98, 100, 102, 104, 106, 108, 110, 112, 114, 116, 118, 120, 122, 124, 126, 128, 130, 132, 134, 136, 138, 140, 142, 144, 146, 148, 150, 152, 154, 156, 158, 160, 162, 164, 166, 168, 170, 172, 174, 176, 178, 180, 182, 184, 186, 188, 190, 192, 194, 196, 202 or 204 or functional fragment thereof, exhibiting increased capability to convert CPT-11 to a topoisomerase inhibitor compared to butyrylcholinesterase. In one embodiment, the topoisomerase inhibitor is SN-38.

[0105] The invention further provides a method of treating cancer by administering to an individual an effective amount of a butyrylcholinesterase variant selected from SEQ ID NOS: 2, 4, 6, 8, 10, 12, 14, 24, 26, 28, 30, 32, 34, 36, 38, 40, 42, 44, 46, 48, 50, 52, 54, 56, 58, 60, 62, 64, 66, 68, 70, 72, 74, 76, 78, 80, 82, 84, 86, 88, 90, 92, 94, 96, 98, 100, 102, 104, 106, 108, 110, 112, 114, 116, 118, 120, 122, 124, 126, 128, 130, 132, 134, 136, 138, 140, 142, 144, 146, 148, 150, 152, 154, 156, 158, 160, 162, 164, 166, 168, 170, 172, 174, 176, 178, 180, 182, 184, 186, 188, 190, 192, 194, 196, 202 or 204, or functional fragment thereof, exhibiting increased capability to convert a paclitaxel prodrug to paclitaxel compared to butyrylcholinesterase. In one embodiment, the cancer is metastatic colorectal cancer. In another embodiment the cancer is ovarian cancer. In another embodiment the cancer is breast cancer. In a further embodiment the cancer is lung cancer. In a still further embodiment the cancer is Kaposi's sarcoma.

[0106] Paclitaxel and camptothecin derivatives are known to be effective chemotherapeutic agents against a variety of cancers. For example, CPT-11 has been approved by the FDA for the treatment of colon cancer. Improvements in the hydrolysis of CPT-11 to SN-38 will aid in the usefulness of this drug and reduce side-effects in patients. For example, side-effects of CPT-11 treatment can include diarrhea, hair loss, nausea, vomiting, myelosuppression, hyperglycemia, alopecia and cholinergic symptoms (Moertel et al., Cancer Chemo. R. 56: 95-101 (1972); Muggia et al., Ca. Chemother. Rep. 56: 515-521 (1972)). In addition to colon cancer, these drugs have been tested in a variety of other cancers (see Hare et al., Cancer Chemtoher. Pharmacol. 39: 187-191 (1997), incorporated herein by reference).

[0107] The invention provides a method of treating cancer in an individual by administering a therapeutically effective amount of the butyrylcholinesterase variant. It is contemplated that a method of treating cancer in an individual by administering a therapeutically effective amount of the butyrylcholinesterase variant can be administration of a variant that further contains an antibody or antibody fragment, for example, the CD20 (SEQ ID NOS: 198 and 200) and EGF (SEQ ID NOS: 18 and 20) antibodies and corresponding fragments described herein. The dosage of a butyrylcholinesterase variant required to be effective depends, for example, on the route and form of administration, the potency and bio-active half-life of the molecule being administered, the weight and condition of the individual, and previous or concurrent therapies. The appropriate amount considered to be an effective dose for a particular application of the method can be determined by those skilled in the art, using the teachings and guidance provided herein. For example, the amount can be extrapolated from in vitro or in vivo butyrylcholinesterase assays described herein. One skilled in the art will recognize that the condition of the individual needs to be monitored throughout the course of treatment and that the amount of the composition that is administered can be adjusted accordingly.

[0108] For treating cancer, a therapeutically effective amount of a butyrylcholinesterase variant of the invention can be, for example, between about 0.1 mg/kg to 0.15 mg/kg body weight, for example, between about 0.15 mg/kg to 0.3 mg/kg, between about 0.3 mg/kg to 0.5 mg/kg or between about 1 mg/kg to 5 mg/kg, depending on the treatment regimen. Similarly, formulations that allow for timed-release of a butyrylcholinesterase variant would provide for the continuous release of a smaller amount of a butyrylcholinesterase variant to an individual treated for cancer. It is understood, that the dosage of a butyrylcholinesterase variant has to be adjusted based on the catalytic activity of the variant, such that a lower dose of a variant exhibiting significantly enhanced camptothecin conversion or hydrolysis activity can be administered compared to the dosage necessary for a variant with lower camptothecin conversion or hydrolysis activity.

[0109] A butyrylcholinesterase variant can be delivered systemically, such as intravenously or intraarterially. A butyrylcholinesterase variant can be provided in the form of isolated and substantially purified polypetides and polypeptide fragments in pharmaceutically acceptable formulations using formulation methods known to those of ordinary skill in the art. These formulations can be administered by standard routes, including for example, topical, transdermal, intraperitoneal, intracranial, intracerebroventricular, intracerebral, intravaginal, intrauterine, oral, rectal or parenteral (e.g., intravenous, intraspinal, subcutaneous or intramuscular) routes. In addition, a butyrylcholinesterase variant can be incorporated into biodegradable polymers allowing for sustained release of the compound useful for treating individual symptomatic of cancer. Biodegradable polymers and their use are described, for example, in detail in Brem et al., J. Neurosurg. 74: 441-446 (1991), which is incorporated herein by reference.

[0110] A butyrylcholinesterase variant can be administered as a solution or suspension together with a pharmaceutically acceptable medium. Such a pharmaceutically acceptable medium can be, for example, water, sodium phosphate buffer, phosphate buffered saline, normal saline or Ringer's solution or other physiologically buffered saline, or other solvent or vehicle such as a glycol, glycerol, an oil such as olive oil or an injectable organic ester. A pharmaceutically acceptable medium can additionally contain physiologically acceptable compounds that act, for example, to stabilize or increase the absorption of the butyrylcholinesterase variant. Such physiologically acceptable compounds include, for example, carbohydrates such as glucose, sucrose or dextrans; antioxidants such as ascorbic acid or glutathione; chelating agents such as EDTA, which disrupts microbial membranes; divalent metal ions such as calcium or magnesium; low molecular weight proteins; lipids or liposomes; or other stabilizers or excipients.

[0111] Formulations suitable for parenteral administration include aqueous and non-aqueous sterile injection solutions such as the pharmaceutically acceptable mediums described above. The solutions can additionally contain, for example, buffers, bacteriostats and solutes which render the formulation isotonic with the blood of the intended recipient. Other formulations include, for example, aqueous and non-aqueous sterile suspensions which can include suspending agents and thickening agents. The formulations can be presented in unit-dose or multi-dose containers, for example, sealed ampules and vials, and can be stored in a lyophilized condition requiring, for example, the addition of the sterile liquid carrier, immediately prior to use. Extemporaneous injection solutions and suspensions can be prepared from sterile powders, granules and tablets of the kind previously described.

[0112] The butyrylcholinesterase variant of the invention can further be utilized in combination therapies with other therapeutic agents. Combination therapies that include a butyrylcholinesterase variant can consist of formulations containing the variant and the additional therapeutic agent individually in a suitable formulation. Alternatively, combination therapies can consist of fusion proteins, where the butyrylcholinesterase variant is linked to a heterologous protein, such as a therapeutic protein or antibody or antibody fragment.

[0113] In vivo modes of administration of antibody therapeutics can include intraperitoneal, intravenous and subcutaneous administration of a fusion polypeptide antibody or a functional fragment thereof. Dosages for antibody therapeutics are known or can be routinely determined by those skilled in the art. For example, such dosages are typically administered so as to achieve a plasma concentration from about 0.01 μg/ml to about 100 μg/ml, about 1-5 μg/ml or about 5 μg/ml. In terms of amount per body weight, these dosages typically correspond to about 0.1-300 mg/kg, about 0.2-200 mg/kg or about 0.5-20 mg/kg. Depending on the need, dosages can be administered once or multiple times over the course of the treatment. Generally, the dosage will vary with the age, condition, sex and extent of the pathology of the subject and should not be so high as to cause adverse side effects. Moreover, dosages can also be modulated by the physician during the course of the treatment to either enhance the treatment or reduce the potential development of side effects. Such procedures are known and routinely performed by those skilled in the art.

[0114] A butyrylcholinesterase variant of the invention also can be delivered to an individual by administering an encoding nucleic acid for the peptide or variant. The encoding nucleic acids for the butyrylcholinesterase variant of the invention are useful in conjunction with a wide variety of gene therapy methods known in the art for delivering a therapeutically effective amount of the polypeptide or variant. Using the teachings and guidance provided herein, encoding nucleic acids for a butyrylcholinesterase variant can be incorporated into a vector or delivery system known in the art and used for delivery and expression of the encoding sequence to achieve a therapeutically effective amount. Applicable vector and delivery systems known in the art include, for example, retroviral vectors, adenovirus vectors, adenoassociated virus, ligand conjugated particles and nucleic acids for targeting, isolated DNA and RNA, liposomes, polylysine, and cell therapy, including hepatic cell therapy, employing the transplantation of cells modified to express a butyrylcholinesterase variant, as well as various other gene delivery methods and modifications known to those skilled in the art, such as those described in Shea et al., Nature Biotechnology 17: 551-554 (1999), which is incorporated herein by reference.

[0115] Specific examples of methods for the delivery of a butyrylcholinesterase variant by expressing the encoding nucleic acid sequence are well known in art and described in, for example, U.S. Pat. No. 5,399,346; U.S. Pat. Nos. 5,580,859; 5,589,466; 5,460,959; 5,656,465; 5,643,578; 5,620,896; 5,460,959; 5,506,125; European Patent Application No. EP 0 779 365 A2; PCT No. WO 97/10343; PCT No. WO 97/09441; PCT No. WO 97/10343, all of which are incorporated herein by reference. Other methods known to those skilled in the art also exist and are similarly applicable for the delivery of a butyrylcholinesterase variant by expressing the encoding nucleic acid sequence.

[0116] It is understood that modifications that do not substantially affect the activity of the various embodiments of this invention are also included within the definition of the invention provided herein. Accordingly, the following examples are intended to illustrate but not limit the present invention.

### EXAMPLE I

### Libraries of Butyrylcholinesterase Variants

[0117] This example describes the synthesis and characterization of butyrylcholinesterase variant libraries expressed in mammalian cells.

[0118] Initial libraries of butyrylcholinesterase variants were generated by mutating residues determined to be important for the catalytic activity of butyrylcholinesterase. Residues within butyrylcholinesterase that are potentially important for catalytic activity were determined by docking a substrate into the active site of butyrylcholinesterase with the FlexiDock program (Tripos Inc., St. Louis, Mo.) in Sybyl 6.4 software on a Silicone Graphics Octane computer. Residues important for catalytic activity were mutated using either PCR-based mutagenesis or codon-based mutagenesis as described herein and packaged into libraries.

[0119] Butyrylcholinesterase variant libraries were generated, for example, using PCR-site directed mutagenesis of human butyrylcholinesterase DNA performed utilizing Pfu polymerase (Stratagene, La Jolla, Calif.). Three oligonucleotide primers were used to perform the mutagenesis. The mutagenesis primers were used at the same time as a general primer such as the SP6 promoter sequencing primer (MBI Fermentas, Amherst, N.Y.) to amplify one end of the butyrylcholinesterase cDNA. The PCR reaction products (megaprimers) were cleaned on QuiaQuick PCR (Qiagen, Santa Clarita, Calif.) according to the manufacturer's protocol to remove excess primers. The cleaned megaprimers were extended in a second PCR reaction to generate the complete 1.8 kb coding sequence of each variant.

[0120] The 1.8-kb fragments constituting the butyrylcholinesterase variants were cloned into the plasmid pGS and resequenced to make sure the desired mutation was present. The plasmid pGS is identical with pRc/CMV (Invitrogen, Carlsbad, Calif.) except that the Neo gene has been replaced by rat glutamine synthesase. These variants can be stably expressed, for example, in Chinese Hamster Ovary (CHO) cell lines, or transiently expressed, for example, as described below in 293T cells.

[0121] Butyrylcholinesterase variant libraries were also generated, for example, using codon-based mutagenesis of human butyrylcholinesterase DNA. Regions of butyrylcholinesterase that were predicted to be important for catalytic efficiency based on structural modeling or sequence alignments between different species were targeted for mutagenesis. Seven regions that were predicted to be important for catalytic efficiency are shown in Table 1.

[0122] The seven regions of butyrylcholinesterase selected for focused library synthesis span residues that include the 8 aromatic active site gorge residues (W82, W112, Y128, W231, F329, Y332, W430 and Y440) as well as two of the catalytic triad residues. The integrity of intrachain disulfide bonds, located between ⁶⁵Cys-⁹²Cys, ²⁵²Cys⁻²⁶³Cys, and ⁴⁰⁰Cys⁻⁵¹⁹Cys is maintained to ensure functional butyrylcholinesterase structure. In addition, putative glycosylation sites (N-X-S/T) located at residues 17, 57, 106, 241, 256, 341, 455, 481, 485, and 486 also generally are avoided in the library synthesis. In total, the seven focused libraries span 79 residues, representing approximately 14% of the butyrylcholinesterase linear sequence, and result in the expression of about 1500 distinct butyrylcholinesterase variants.

[0123] Libraries of nucleic acids corresponding to the seven regions of human butyrylcholinesterase to be mutated are synthesized by codon-based mutagenesis, as described above. Briefly, multiple DNA synthesis columns are used for synthesizing the oligonucleotides by β-cyanoethyl phosphoramidite chemistry, as described previously by Glaser et al., supra, 1992. In the first step, trinucleotides encoding for the amino acids of butyrylcholinesterase are synthesized on one column while a second column is used to synthesize the trinucleotide NN(G/T), where N is a mixture of dA, dG, dC, and dT cyanoethyl phosphoramadites. Using the trinucleotide NN(G/T) results in thorough mutagenesis with minimal degeneracy, accomplished through the systematic expression of all twenty amino acids at every position.

[0124] Following the synthesis of the first codon, resins from the two columns are be mixed together, divided, and replaced in four columns. By adding additional synthesis columns for each codon and mixing the column resins pools of degenerate oligonucleotides will be segregated based on the extent of mutagenesis. The resin mixing aspect of codon-based mutagenesis makes the process rapid and cost-effective because it eliminates the need to synthesize multiple oligonucleotides. In the present study, the pool of oligonucleotides encoding single amino acid mutations are used to synthesize focused butyrylcholinesterase libraries. The oligonucleotides encoding the butyrylcholinesterase variants containing a single amino acid mutation can be cloned, for example, into the doublelox targeting vector using oligonucleotide-directed mutagenesis (Kunkel, supra, 1985).

[0125] Several butyrylcholinesterase variants from the libraries described above were found to have enhanced catalytic activity when compared to wild-type butyrylcholinesterase. Variants from the libraries described above were also assayed for enhanced carboxylesterase activity using a variety of assays described herein, such as the o-nitrophenyl acetate hydrolysis assay and HPLC assay for the formation of SN-38. One variant from these libraries, referred to as F227A (SEQ ID NO: 2), showed at least a 3 fold increase in butyrylcholinesterase activity compared to wild-type butyrylcholinesterase in the HPLC assay. F227A contains a single amino acid substitution in the human butyrylcholinesterase polypeptide sequence which replaces a phenylalanine at position 227 with an alanine. At the DNA level this is a change from a TTT codon to a GCG codon.

[0126] Using the F227A variant as a template, additional site-directed mutations were generated resulting in the construction of several double mutants. The regions chosen for site-directed mutation were residues predicted to be important for catalytic efficiency as described herein (see, for example, Table 1). For example, the following double mutants were generated (see Table 2). The nucleotide and amino acid sequence of human butyrylcholinesterase (SEQ ID NOS: 21 and 22) is shown in FIG. 11 for reference.

TABLE 2

| | Amino acid change | Codon change |
|---|---|---|
| | (in addition to F227A change, | (in addition to F227A |
| BChE Variant | phenylalanine to alanine) | change, TTT to GCT) |
| F227A/T284A | threonine to alanine | ACT to GCT |
| F227A/L286Q | leucine to glutamine | TTG to CAG |
| F227A/L286S | leucine to serine | TTG to TCG |
| F227A/L286H | leucine to histidine | TTG to CAT |
| F227A/L286W | leu to tryptophan | TTG to TGG |
| F227A/S287P | serine to proline | TCA to CCT |

[0127] Butyrylcholinesterase variants that contain double mutations were expressed in a transient system using 293T human embryonic kidney cells. Briefly, on day 1, 293T cells were plated at 1.5×10⁵ cells/well in a BioCoat 24-well plate. The cells were then allowed to recover overnight. On the second day, dilute 2 ul of Lipofectamine 2000/well in 50 ul Opti-MEM/well, and incubate 5 minutes. Dilute 500 ng-1 ug DNA/well in 50 ul Opti-MEM/well. The two diluted solutions were mixed, and incubated for 20 minutes at room temperature. Media was removed from cells and replaced with 500 ul/well complete growth media, without penicillin or streptomycin. Subsequently, 100 ul of diluted solutions was added to each well, and incubated on cells for 4 hours. The media/DNA/Lipofectamine 2000 was removed from cells, and replaced with 1 ml of Ultraculture serum free media (Bio Wittaker) per well. The butyrylcholinesterase variant polypeptides were allowed to accumulate for 48-96 hours and the conditioned media from the cells was used directly. For other applications the butyrylcholinesterase variant polypeptides can be purified as described below in Example VI.

[0128] Butyrylcholinesterase variants that contain double mutations were assayed for activity as described below. For example, the variants were assayed for carboxylesterase activity using an o-nitrophenyl acetate hydrolysis assay, CPT-11 conversion activity using an HPLC based assay, and cytotoxicity of a cancer cell line.

### EXAMPLE II

### Carboxylesterase Activity of Butyrylcholinesterase Variants

[0129] This example shows carboxylesterase activity of several butyrylcholinesterase variants.

[0130] A standard assay for carboxylesterase activity is the o-nitrophenyl acetate (o-NPA) hydrolysis assay (see Beaufay et al., J. Cell. Biol. 61: 188-200 (1974)). A modification of this assay that measures o-NPA activity of butyrylcholinesterase variants normalized by capturing with an anti-butyrylcholinesterase antibody was performed as described below.

[0131] Protocol to Determine Carboxylesterase activity of Captured Butyrylcholinesterase by o-Nitrophenyl acetate:
[0132] 1) Coat 96-well Immulon 2 plates with rabbit anti-human butyrylcholinesterase (Dako #A0032) at 10 mg/ml in PBS (100 ml/well) overnight at 4° C.
[0133] 2) Remove coating solution and block plate with 3% BSA in PBS (250 ml/well) for 2 hours at room temperature.
[0134] 3) Add 200 ml butyrylcholinesterase variant conditioned media and incubate at RT for 2 hrs.
[0135] 4) Wash plate 3 times with 250 ml/well PBS.
[0136] 5) Add 85 ml/well 0.1 M potassium phosphate pH 7.0
[0137] 6) Add 13.6 mg o-NPA to 100 ml acetonitrile, mix to dissolve. Add 100 ml of this stock to 6.3 mls water and mix well.
[0138] 7) Wash plate 3 times with PBS.
[0139] 8) Add 15 ml of diluted o-NPA substrate.
[0140] 9) Read absorbance at 405 nm.

[0141] Conditioned media from butyrylcholinesterase variants that were transiently expressed in 293T cells was tested using the above described anti-butyrylcholinesterase antibody capture/normalization assay for carboxylesterase activity. As shown in the representative assay in FIG. 1, several butyrylcholinesterase variants showed carboxylesterase activity. The first variant shown in FIG. 1 is F227A (see left-most bar). The level of activity of the other variants can be compared to the level of activity of F227A. The level of activity of wild-type butyrylcholinesterase in this assay was approximately 50% of the level of activity seen with F227A. In order to determine the amount of variability present in the assay, several wells contained the same variant. For example, four wells are labeled as containing the F227A variant in addition to the first well. The level of activity in all five wells is similar and demonstrates a low level of variability within this assay.

[0142] Butyrylcholinesterase residues identified by this method that effect carboxylesterase substrate hydrolysis include the following: F227, A328, Y332, T284, P285, L286. This assay can be used to quickly screen a number of variants for activity. Activity measured in this assay can be predictive of CPT-11 activation and can be used to identify residues or regions of BChE involved in CPT-11 activation.

### EXAMPLE III

### CPT-11 Conversion Activity of Butyrylcholinesterase Variants

[0143] This example shows butyrylcholinesterase variants that have increased CPT-11 conversion activity compared to butyrylcholinesterase.

[0144] Butyrylcholinesterase variants were assayed for CPT-11 conversion activity using fluorescent High Performance Liquid Chromotography (HPLC) detection of SN-38 formation as described in Dodds and Rivory, Mol. Pharmacol. 56: 1346-1353 (1999), which is incorporated herein by reference. The conversion of CPT-11 to SN-38 is shown in FIG. 2. Briefly, conditioned media from transiently expressed BChE variants were exposed to 20 mM CPT-11 for 72 hours at 37° C. and analyzed by HPLC for SN-38 formation (peak at about 4 minutes column retention time). FIG. 3 shows the amount of SN-38 produced using conditioned media from cells that were mock-transfected which means that the transfection was performed as usual however no DNA was added. FIG. 4 shows the amount of SN-38 produced using conditioned media from cells that were transfected with F227A, and FIG. 5 shows the amount of SN-38 produced using conditioned media from cells that were transfected with F227A/L286S.

[0145] As shown in FIGS. 3-5, the F227A variant produced a small amount of SN-38 and variant F227A/L286S showed significant conversion Of CPT-11 to SN-38 as compared to mock and F227A variant conditioned medias. In this assay, wild-type butyrylcholinesterase did not show detectable levels of SN-38.

[0146] Butyrylcholinesterase variants identified by this method that had increased CPT-11 conversion to SN-38 compared to wild-type butyrylcholinesterase include: F227A (SEQ ID NO: 2), F227A/T284A (SEQ ID NO: 4), F227A/L286Q (SEQ ID NO: 6), F227A/L286S (SEQ ID NO: 8), F227A/L286H (SEQ ID NO: 10), F227A/L286W (SEQ ID NO: 12), and F227A/S287P (SEQ ID NO: 14). Table 3 shows the approximate fold improvement in CPT-11 conversion to SN-38 in these variants. The actual fold improvement can be significantly higher than listed in Table 3 because the values in Table 3 are based on the fold improvement compared to wild-type butyrylcholinesterase. Since the activity of wild-type butyrylcholinesterase is extremely low in this assay (less than 1% conversion), the value for wild-type butyrylcholinesterase is prone to more variability than other activity values. Therefore, the activity values listed in Table 3 are very conservative values for the activity of these variants and so the variants in Table 3 have at least the listed activity value and more. For example, the butyrylcholinesterase variant F227A/L268S (SEQ ID NO: 8) has at least a 50-fold increase in camptothecin conversion activity compared to butyrylcholinesterase. Said another way, the butyrylcholinesterase variant F227A/L268S (SEQ ID NO: 8) exhibits a 50-fold or greater increase in conversion capability compared to the butyrylcholinesterase.

TABLE 3

| | | Fold improvement in CPT-11 |
|---|---|---|
| SEQ ID NO: | BChE Variant | conversion |
| 2 | F227A | >3 |
| 4 | F227A/T284A | >7 |
| 6 | F227A/L286Q | >10 |
| 8 | F227A/L286S | >50 |
| 10 | F227A/L286H | >35 |
| 12 | F227A/L286W | >42 |
| 14 | F227A/S287P | >6 |

### EXAMPLE IV

### Butyrylcholinesterase-Mediated Cytotoxicity and Enchanced CPT-11 Activated Killing by Butyrylcholinesterase Variants

[0147] This example shows butyrylcholinesterase variants that have increased cytotoxicity in a cancer cell line compared to butyrylcholinesterase.

[0148] A cellular cytotoxicity assay was used to demonstrate the level of CPT-11 activation by BChE variants. Clinically relevant concentrations of CPT-11 (0.5-10 mM) were exposed to BChE variants for 24-72 hours at 37° C. Briefly, CPT-11 at 4 mM was incubated for 72 hours with expressed wild-type BChE, the 6-6 variant, or F227A/L286Q variant. SW48 colon carcinoma cells were exposed to the activated CPT-11 at a concentration of 0.5 mM for 72 hours and cell viability measured by the MTT method. The MTT (3-(4,5-dimethylthiazolyl-2)-2,5-diphenyltetrazolium bromide) assay is commercially available and can be used to measure cell viability based on the ability of a cell to reduce a redox sensitive dye. Note the 6-6 variant is a quadruple mutant referenced as A328W/Y332M/S287G/F227A (SEQ ID NO: 16) in the nomenclature used throughout to describe variants. The 6-6 variant contains the following codons at variant positions: GCG encodes alanine at amino acid position 227, GGT encodes glycine at amino acid position 287, ATG encodes methionine at amino acid position 332, and TGG encodes tryptophane at amino acid position 328.

[0149] As shown in FIG. 6, CPT-11 mediated cytotoxicity in SW48 colon carcinoma cells is significantly enhanced in the presence of BChE and BChE variants. Both the 6-6 variant (SEQ ID NO: 16) and F227/L286Q (SEQ ID NO: 6) variant showed increased tumor cell cytotoxicity mediated by CPT-11 activation.

### EXAMPLE V

### Antibody-Butyrylcholinesterase Fusion Polypeptide for the Targeted Activation of CPT-11

[0150] This example shows the construction and characterization of an anti-EGF receptor-BChE fusion polypeptide which can be used for Antibody Directed Enzyme Pro-drug Therapy (ADEPT) with CPT-11.

[0151] A model antibody-BChE fusion polypeptide was constructed by fusing the N-terminus of the BChE (truncated L530 monomer) to the C-terminus of the CH1 domain of the anti-epidermal growth factor receptor (EGFR) antibody ch225. The two domains are linked by either a GGGS linker or the natural antibody hinge region. A model antibody-enzyme fusion polypeptide was produced which exhibits both antigen binding and catalytic enzyme functions. The nucleotide and amino acid sequence of the mouse anti-EGF variable light chain is shown in FIG. 9 and the nucleotide and amino acid sequence of the mouse anti-EGF variable heavy chain and constant heavy chain 1 hinge region of L530 is shown in FIG. 10.

[0152] The truncated L530 monomer is described in Blong et al., Biochem. J. 327: 747-757 (1997) and is incorporated herein by reference. This monomer contains a BChE which is truncated at the C terminus such that it does not assemble into a tetramer as seen with wild-type BChE. The L530 monomer does retain most or all butyrylcholinesterase (BChE) activity.

[0153] An ELISA assay showing binding of expressed anti-EGFR-BChE L530 to anti-kappa capture antibody and measuring activity of bound butyrylcholinesterase by butyrylthiocholine hydrolysis is shown in FIG. 7. This demonstrates that intact fusion polypeptide (bound through the antibody light chain) exhibits butyrylcholinesterase activity.

[0154] The protocol for anti-Kappa capture of anti-EGFR-L530 is as follows:
[0155] 1) Coat 96-well Immulon 2 plates with 200 ml of 10 mg/ml anti-human Kappa antibody in PBS overnight.
[0156] 2) Block plate with 3% BSA in PBS (250 ml/well) for 2 hours at room temperature.
[0157] 3) Wash plate 3× with 250 ml/well PBS.
[0158] 4) Add 200 ml BChE conditioned media and incubate at RT for 2 hours.
[0159] 5) Prepare working solution of DTNB by making a 1:10 dilution of stock 5 mM DTNB in 0.1 M Potassium phosphate pH 7.0. Add 180 ml per well
[0160] 6) Prepare working solution of Butyrythiocholine (BTC) by making 1:20 dilution of 200 mM stock in water. Add 20 ml per well.
[0161] 7) Incubate plate at 37° C. and read on a spectrophotometer at A405 nm.

[0162] An ELISA assay measuring butyrylcholinesterase activity of the anti-EGFR-BChE L530 specifically bound to a cell membrane preparation containing the EGFR antigen is shown in FIG. 8. These results demonstrates antigen-specific binding of the fusion protein through the antibody domain and enzymatic activity of the butyrylcholinesterase domain.

[0163] The protocol for anti-EGFR binding to A431 membrane preparations is as follows:
[0164] 1) Coat 96-well Immulon 2 plates with 50 ml/well of A431 cell lysate diluted 1/20 in 10 mM HEPES pH 7.4, 0.1% Triton X-100 and dry in the hood overnight.
[0165] 2) Block plate with 3% BSA in PBS (250 ml/well) for 2 hours at room temperature.
[0166] 3) Wash plate 3× with 250 ml/well PBS.
[0167] 4) Add 200 ml BChE conditioned media and incubate at RT for 2 hours.
[0168] 5) Prepare working solution of DTNB by making a 1:10 dilution of stock 5 mM DTNB in 0.1 M Potassium phosphate pH 7.0. Add 180 ml per well
[0169] 6) Prepare working solution of Butyrythiocholine (BTC) by making 1:20 dilution of 200 mM stock in water. Add 20 ml per well.
[0170] 7) Incubate plate at 37° C. and read on a spectrophotometer at A405 mm.

### EXAMPLE VI

### Purification and Characterization of the Butyrylcholinesterase Variants

[0171] This example shows how butyrylcholinesterase variant polypeptides can be purified. These purified polypeptides can be used, for example, in the assays and pharmaceutical compositions described herein.

[0172] To purify the butyrylcholinesterase variants, the culture medium corresponding to each variant is filtered through Whatman #1 filter paper (Whatman Inc., Clifton, N.J.) on a Buchner funnel. The filtrate is poured through a chromatography column (XK50/30, Pharmacia Biotech, Piscatawy, N.J.) packed with 100 ml of affinity gel procainamide-Sepharose 4B. The butyrylcholinesterase variants stick to the affinity gel during loading so that 20 mg of enzyme that was previously in 20 liters is concentrated in 100 ml of affinity gel. The affinity gel is subsequently washed with 0.3M sodium chloride in 20 mM potassium phosphate pH 7.0 and 1 mM EDTA to elute contaminating proteins. Next, the affinity gel is washed with buffer containing 20 mM potassium phosphate and 1 mM EDTA pH 7.0 to reduce the ionic strength. Finally, the butyrylcholinesterasae variants is eluted with 250 ml of 0.2M procainamide in buffer.

[0173] To further purify the butyrylcholinesterase variants and remove the procainamide a second purification step can be performed. The butyrylcholinesterase variants recovered in the first purification step are diluted 10-fold with buffer (20 mM TrisCl, 1 mM EDTA pH 7.4) to reduce the ionic strength to about 0.02M. The diluted enzyme is loaded onto a column containing 400 ml of the weak anion exchanger DE52 (Whatman, Clifton, N.J.). At this low ionic strength the butyrylcholinesterase variant sticks to the ion exchange gel. After loading is complete the column is washed with 2 liters of buffer containing 20 mM TrisCl and 1 mM EDTA pH7.4 until the absorbency of the eluant at 280 nm is nearly zero, indicating that the procainamide has washed off. Subsequently, the butyrylcholinesterase variants are eluted from the column with a salt gradient from 0 to 0.2M NaCl in 20 mM TrisCl pH 7.4. Following the elution of the butyrylcholinesterase variants 10 ml fractions are collected for each variant using a fraction collector. Activity assays are performed to identify the peak containing butyrylcholinesterase variant. SDS gel electrophoresis can be performed to determine the purity of each butyrylcholinesterase variants, which is typically determined to be approximately 90%.

### EXAMPLE VII

### Production of Antibody-BChE Fusion Proteins and Evaluation of Targeted Prodrug Activation and Cytotoxicity In Vitro

[0174] This example demonstrates optimization BChE variants in an antibody directed enzyme prodrug therapy model. Antibody-enzyme fusion proteins incorporating optimized variant residues were identified by library screening and the feasibility of using optimized BChE in ADEPT with CPT-11 was confirmed by targeting CD20, a non-internalizing cell surface antigen present on B-lymphocytes.

[0175] CD20 is a useful target antigen to test the feasibility of using optimized BChE in ADEPT as the antigen is abundantly expressed on human B lymphoma lines (3.2×10⁵ molecules/cell) and does not undergo significant internalization upon antibody binding. AME133 is a humanized anti-CD20 with fully human germline framework regions shown in FIGS. 19 and 20 and set forth as SEQ ID NOS: 198 and 200, with corresponding nucleic acid sequences SEQ ID NOS: 197 and 199. This antibody was generated at Applied Molecular Evolution using the company's directed evolution strategies, and the monovalent Fab binds to CD20 with extremely high affinity (1×10⁻⁹ M). An exemplary model fusion protein (anti-CD20-BChE.4-1) was generated and is shown in FIG. 19. Anti-CD20-BChE.4-1 (SEQ ID NO: 202) is composed of AME133 Fab fused at the C-terminal end of the CH1 heavy chain domain to the N-terminus of modified BChE variant L530 (SEQ ID NO: 204), which is a functional fragment of reference SEQ ID NO: 180. The BChE variant was truncated at amino acid 530 to abrogate its normal assembly into tetramers. The monomeric version of the enzyme exhibits the equivalent activity of each subunit of the naturally occurring tetrameric form, with no loss of activity due to allosteric effects as described by Blong et al., Biochem J 327 (Pt 3): 747-57 (1997).

[0176] Non-adherent HEK 293 cells were adapted to suspension culture in serum-free low protein media (UltraCULTURE, BioWhittaker) and transiently transfected with fusion protein, producing yields of 2-4 mg/L. A two-step purification procedure was developed using anion exchange on Sepharose Q followed by a hydrophobic interaction chromatography step on phenyl Sepharose. This resulted in product of >90% purity with one major contaminant band detected by SDS-PAGE. The fusion protein maintains a Km value for CPT-11 identical to that of the BChE.4-1 variant alone. Control fusion protein constructs have also been generated and expressed. These are AME133 Fab fused at the C-terminal end of the CH1 heavy chain domain to the N-terminus of truncated wild type BChE (anti-CD20-BChE.wt) and anti-epidermal growth factor receptor (EGFR) Fab fused to BChE.4-1.

[0177] As shown in FIG. 14, anti-CD20-BChE fusion proteins exhibit antigen specific binding to CD20 positive SKW tumor cells as compared to the control anti-EGFR-BChE construct. Bound fusion protein was detected by BChE specific hydrolysis of butyrylthiocholine iodide.

[0178] In order to demonstrate the utility of the fusion protein in ADEPT, it was shown that the anti-CD20-BChE fusion protein binds tightly to tumor cells in vitro and generates cytotoxic SN38 in the presence of CPT-11. Antigen-positive SKW 6.4 human B lymphoma cells were incubated with anti-CD20-BChE.4-1 and unbound fusion protein was removed by washing. Cells were then incubated with increasing concentrations of CPT-11 for four hours and washed again. Cell viability was assessed 72 hours later. Following incubation with anti-CD20-BChE.4-1, a 7 to 10-fold decrease in the EC₅₀ of CPT-11 was observed, relative to cells treated with mock conditioned media (FIG. 15). Briefly, live tumor cells were pre-incubated with anti-CD20-BChE.4-1 or mock conditioned media and washed prior to 4-hour exposure to CPT-11 over a range of concentrations. Bound fusion protein resulted in a marked decrease in the EC50 for CPT-11 killing. Cell viability was evaluated in a 72 hour MTT assay. Similar experiments using control anti-EGFR-BChE.4-1 or anti-CD20-BChE.wt showed no increase in cytotoxicity over CPT-11 alone. In these experiments approximately 0.8 units of fusion protein BTC activity were localized per 1×10⁶ (1.2 mg) SKW cells.

[0179] In patients treated with 200 mg/m2 CPT-11, plasma concentrations of CPT-11 remained above 0.1 μM for at least 24 hours (Ducreux et al., Ann Oncol 14 Suppl 2: ii17-23 (2003)). CPT-11 is dosed as a single agent at up to 500 mg/m² and plasma peak concentration is dose-proportional (Mathijssen et al. Clin Cancer Res 7: 2182-94 (2001); Ducreux et al., supra, 2003). These findings demonstrate the targeted killing of tumor cells with anti-CD20-BChE.4-1 in vitro at concentrations of CPT-11 that are pharmacologically relevant and sustainable over time in patients.

### EXAMPLE VIII

### Optimization of Butyrylcholinesterase for the Improved Activation of CPT-11

[0180] This example demonstrates identifation of additive variants incorporating beneficial mutations from different library regions that resulted, inter alia, in the isolation of the H77F, F227A, P285N, V331A variant (SEQ ID NO: 180), also referred to as the 4-1 variant, exhibiting a >3000-fold increase in CPT-11 hydrolysis over wild-type BChE (FIG. 12) and a 5-6-fold improvement in the Km for CPT-11, from 40 μM to ˜7 μM.

[0181] A series of focused BChE variant libraries corresponding to amino acids predicted to be lining the active site gorge (Harel et al., supra, 1992) of the enzyme was synthesized. Using pools of oligonucleotides encoding single amino acid mutations for 7 different library regions of 6-15 residues, libraries were synthesized using uracil-containing single-stranded DNA as a template for oligonucleotide-directed mutagenesis (Glaser et al., supra, 1992). Transformed libraries were plated on agar, and bacterial clones were picked and grown in a 96-well format for DNA plasmid preps.

[0182] BChE plasmid variants were expressed transiently in the human embryonic kidney cell line 293T and assayed for activity at 72 hours post-transfection. Primary screening of variants was performed by indirect measurement of enzymatic activation of CPT-11 (FIG. 2) in SW48 colon carcinoma cell cytotoxicity assays. Enzyme expression in this system varies less than 20% between wells. To avoid identification of expression variants, only hits exhibiting >2-fold increased cytotoxicity were picked. Functional hits identified in these assays were characterized by sequence analysis of the corresponding DNA from the original preps. Primary screening resulted in the identification of 65 beneficial amino acid changes at 25 different positions in the enzyme. Direct measurement of BChE-mediated CPT-11 hydrolysis was quantitated by fluorescence detection of SN38 separated by reverse-phase HPLC (Dodds and Rivory, Mol Pharmacol 56: 1346-53 (1999). This method was used to compare SN38 formation by expressed variants to that of the wild-type enzyme and to calculate the Km of variants for CPT-11. Identification of additive variants incorporating beneficial mutations from different library regions resulted in the isolation of a variant exhibiting a >3000-fold increase in CPT-11 hydrolysis over wild-type BChE (FIG. 12) and a 5-6-fold improvement in the Km for CPT-11, from 40 μM to ˜7 μM (FIG. 13). FIG. 13 shows a Hofstee plot of CPT-11 hydrolysis by BChE variant 4-1. Enzyme was incubated at 37° C. for 24 hours with CPT-11 over a range of concentrations from 1-80 μM. The variant exhibits a Km of 6.9 μM, a >5-fold improvement over the 40 μM Km characteristic of native serum BChE. Velocity (v) is in light absorbance units at 540 nm. Substrate concentration [s] is μM CPT-11.

[0183] For the quantitation of SN38 formation by BChE variant 4-1, wild type (20 μg) or BChE.4-1 (0.05 μg) enzymes were incubated with CPT-11 at 37° C. for 24 hours. Samples were acidified and resolved by reverse-phase HPLC on a NovaPak C18 column to separate SN38 from unactivated CPT-11. SN38 peak area under the curve (AUC) was used to compare CPT-11 activation by the wild-type enzyme to the optimized BChE.4-1 variant.

[0184] Throughout this application various publications have been referenced within parentheses. The disclosures of each of these publications in their entireties are hereby incorporated by reference in this application in order to more fully describe the state of the art to which this invention pertains.

[0185] Although the invention has been described with reference to the disclosed embodiments, those skilled in the art will readily appreciate that the specific experiments detailed are only illustrative of the invention. It should be understood that various modifications can be made without departing from the spirit of the invention. Accordingly, the invention is limited only by the following claims.

The application's sequence listing, which the Patent Office published only in electronic form, follows.

SEQUENCE LISTING (204 sequences)

SEQ ID NO: 1 - DNA, 1722 bp, Artificial Sequence
  CDS (1)...(1722): synthetic butyrylcholinesterase variant
gaagatgacatcataattgcaacaaagaatggaaaagtcagagggatgaacttgacagtttttggtggcacggtaacagcctttcttggaattccctatgcacagccacctcttggtagacttcgattcaaaaagccacagtctctgaccaagtggtctgatatttggaatgccacaaaatatgcaaattcttgctgtcagaacatagatcaaagttttccaggcttccatggatcagagatgtggaacccaaacactgacctcagtgaagactgtttatatctaaatgtatggattccagcacctaaaccaaaaaatgccactgtattgatatggatttatggtggtggttttcaaactggaacatcatctttacatgtttatgatggcaagtttctggctcgggttgaaagagttattgtagtgtcaatgaactatagggtgggtgccctaggattcttagctttgccaggaaatcctgaggctccagggaacatgggtttatttgatcaacagttggctcttcagtgggttcaaaaaaatatagcagcctttggtggaaatcctaaaagtgtaactctctttggagaaagtgcaggagcagcttcagttagcctgcatttgctttctcctggaagccattcattgttcaccagagccattctgcaaagtggttccgckaatgctccttgggcggtaacatctctttatgaagctaggaacagaacgttgaacttagctaaattgactggttgctctagagagaatgagactgaaataatcaagtgtcttagaaataaagatccccaagaaattcttctgaatgaagcatttgttgtcccctatgggactcctttgtcagtaaactttggtccgaccgtggatggtgattttctcactgacatgccagacatattacttgaacttggacaatttaaaaaaacccagattttggtgggtgttaataaagatgaagggacagcttttttagtctatggtgctcctggcttcagcaaagataacaatagtatcataactagaaaagaatttcaggaaggtttaaaaatattttttccaggagtgagtgagtttggaaaggaatccatcctttttcattacacagactgggtagatgatcagagacctgaaaactaccgtgaggccttgggtgatgttgttggggattataatttcatatgccctgccttggagttcaccaagaagttctcagaatggggaaataatgcctttttctactattttgaacaccgatcctccaaacttccgtggccagaatggatgggagtgatgcatggctatgaaattgaatttgtctttggtttacctctggaaagaagagataattacacaaaagccgaggaaattttgagtagatccatagtgaaacggtgggcaaattttgcaaaatatgggaatccaaatgagactcagaacaatagcacaagctggcctgtcttcaaaagcactgaacaaaaatatctaaccttgaatacagagtcaacaagaataatgacgaaactacgtgctcaacaatgtcgattctggacatcattttttccaaaagtcttggaaatgacaggaaatattgatgaagcagaatgggagtggaaagcaggattccatcgctggaacaattacatgatggactggaaaaatcaatttaacgattacactagcaagaaagaaagttgtgtgggtctc

SEQ ID NO: 2 - protein, 574 aa, Artificial Sequence
  synthetic butyrylcholinesterase variant
  VARIANT 227: Xaa = Ala
EDDIIIATKNGKVRGMNLTVFGGTVTAFLGIPYAQPPLGRLRFKKPQSLTKWSDIWNATKYANSCCQNIDQSFPGFHGSEMWNPNTDLSEDCLYLNVWIPAPKPKNATVLIWIYGGGFQTGTSSLHVYDGKFLARVERVIVVSMNYRVGALGFLALPGNPEAPGNMGLFDQQLALQWVQKNIAAFGGNPKSVTLFGESAGAASVSLHLLSPGSHSLFTRAILQSGSXNAPWAVTSLYEARNRTLNLAKLTGCSRENETEIIKCLRNKDPQEILLNEAFVVPYGTPLSVNFGPTVDGDFLTDMPDILLELGQFKKTQILVGVNKDEGTAFLVYGAPGFSKDNNSIITRKEFQEGLKIFFPGVSEFGKESILFHYTDWVDDQRPENYREALGDVVGDYNFICPALEFTKKFSEWGNNAFFYYFEHRSSKLPWPEWMGVMHGYEIEFVFGLPLERRDNYTKAEEILSRSIVKRWANFAKYGNPNETQNNSTSWPVFKSTEQKYLTLNTESTRIMTKLRAQQCRFWTSFFPKVLEMTGNIDEAEWEWKAGFHRWNNYMMDWKNQFNDYTSKKESCVGL

SEQ ID NO: 3 - DNA, 1722 bp, Artificial Sequence
  CDS (1)...(1722): synthetic butyrylcholinesterase variant
gaagatgacatcataattgcaacaaagaatggaaaagtcagagggatgaacttgacagtttttggtggcacggtaacagcctttcttggaattccctatgcacagccacctcttggtagacttcgattcaaaaagccacagtctctgaccaagtggtctgatatttggaatgccacaaaatatgcaaattcttgctgtcagaacatagatcaaagttttccaggcttccatggatcagagatgtggaacccaaacactgacctcagtgaagactgtttatatctaaatgtatggattccagcacctaaaccaaaaaatgccactgtattgatatggatttatggtggtggttttcaaactggaacatcatctttacatgtttatgatggcaagtttctggctcgggttgaaagagttattgtagtgtcaatgaactatagggtgggtgccctaggattcttagctttgccaggaaatcctgaggctccagggaacatgggtttatttgatcaacagttggctcttcagtgggttcaaaaaaatatagcagcctttggtggaaatcctaaaagtgtaactctctttggagaaagtgcaggagcagcttcagttagcctgcatttgctttctcctggaagccattcattgttcaccagagccattctgcaaagtggttccgckaatgctccttgggcggtaacatctctttatgaagctaggaacagaacgttgaacttagctaaattgactggttgctctagagagaatgagactgaaataatcaagtgtcttagaaataaagatccccaagaaattcttctgaatgaagcatttgttgtcccctatggggckcctttgtcagtaaactttggtccgaccgtggatggtgattttctcactgacatgccagacatattacttgaacttggacaatttaaaaaaacccagattttggtgggtgttaataaagatgaagggacagcttttttagtctatggtgctcctggcttcagcaaagataacaatagtatcataactagaaaagaatttcaggaaggtttaaaaatattttttccaggagtgagtgagtttggaaaggaatccatcctttttcattacacagactgggtagatgatcagagacctgaaaactaccgtgaggccttgggtgatgttgttggggattataatttcatatgccctgccttggagttcaccaagaagttctcagaatggggaaataatgcctttttctactattttgaacaccgatcctccaaacttccgtggccagaatggatgggagtgatgcatggctatgaaattgaatttgtctttggtttacctctggaaagaagagataattacacaaaagccgaggaaattttgagtagatccatagtgaaacggtgggcaaattttgcaaaatatgggaatccaaatgagactcagaacaatagcacaagctggcctgtcttcaaaagcactgaacaaaaatatctaaccttgaatacagagtcaacaagaataatgacgaaactacgtgctcaacaatgtcgattctggacatcattttttccaaaagtcttggaaatgacaggaaatattgatgaagcagaatgggagtggaaagcaggattccatcgctggaacaattacatgatggactggaaaaatcaatttaacgattacactagcaagaaagaaagttgtgtgggtctc

SEQ ID NO: 4 - protein, 574 aa, Artificial Sequence
  synthetic butyrylcholinesterase variant
  VARIANT 227: Xaa = Ala
  VARIANT 284: Xaa = Ala
EDDIIIATKNGKVRGMNLTVFGGTVTAFLGIPYAQPPLGRLRFKKPQSLTKWSDIWNATKYANSCCQNIDQSFPGFHGSEMWNPNTDLSEDCLYLNVWIPAPKPKNATVLIWIYGGGFQTGTSSLHVYDGKFLARVERVIVVSMNYRVGALGFLALPGNPEAPGNMGLFDQQLALQWVQKNIAAFGGNPKSVTLFGESAGAASVSLHLLSPGSHSLFTRAILQSGSXNAPWAVTSLYEARNRTLNLAKLTGCSRENETEIIKCLRNKDPQEILLNEAFVVPYGXPLSVNFGPTVDGDFLTDMPDILLELGQFKKTQILVGVNKDEGTAFLVYGAPGFSKDNNSIITRKEFQEGLKIFFPGVSEFGKESILFHYTDWVDDQRPENYREALGDVVGDYNFICPALEFTKKFSEWGNNAFFYYFEHRSSKLPWPEWMGVMHGYEIEFVFGLPLERRDNYTKAEEILSRSIVKRWANFAKYGNPNETQNNSTSWPVFKSTEQKYLTLNTESTRIMTKLRAQQCRFWTSFFPKVLEMTGNIDEAEWEWKAGFHRWNNYMMDWKNQFNDYTSKKESCVGL

SEQ ID NO: 5 - DNA, 1722 bp, Artificial Sequence
  CDS (1)...(1722): synthetic butyrylcholinesterase variant
gaagatgacatcataattgcaacaaagaatggaaaagtcagagggatgaacttgacagtttttggtggcacggtaacagcctttcttggaattccctatgcacagccacctcttggtagacttcgattcaaaaagccacagtctctgaccaagtggtctgatatttggaatgccacaaaatatgcaaattcttgctgtcagaacatagatcaaagttttccaggcttccatggatcagagatgtggaacccaaacactgacctcagtgaagactgtttatatctaaatgtatggattccagcacctaaaccaaaaaatgccactgtattgatatggatttatggtggtggttttcaaactggaacatcatctttacatgtttatgatggcaagtttctggctcgggttgaaagagttattgtagtgtcaatgaactatagggtgggtgccctaggattcttagctttgccaggaaatcctgaggctccagggaacatgggtttatttgatcaacagttggctcttcagtgggttcaaaaaaatatagcagcctttggtggaaatcctaaaagtgtaactctctttggagaaagtgcaggagcagcttcagttagcctgcatttgctttctcctggaagccattcattgttcaccagagccattctgcaaagtggttccgckaatgctccttgggcggtaacatctctttatgaagctaggaacagaacgttgaacttagctaaattgactggttgctctagagagaatgagactgaaataatcaagtgtcttagaaataaagatccccaagaaattcttctgaatgaagcatttgttgtcccctatgggactcctcagtcagtaaactttggtccgaccgtggatggtgattttctcactgacatgccagacatattacttgaacttggacaatttaaaaaaacccagattttggtgggtgttaataaagatgaagggacagcttttttagtctatggtgctcctggcttcagcaaagataacaatagtatcataactagaaaagaatttcaggaaggtttaaaaatattttttccaggagtgagtgagtttggaaaggaatccatcctttttcattacacagactgggtagatgatcagagacctgaaaactaccgtgaggccttgggtgatgttgttggggattataatttcatatgccctgccttggagttcaccaagaagttctcagaatggggaaataatgcctttttctactattttgaacaccgatcctccaaacttccgtggccagaatggatgggagtgatgcatggctatgaaattgaatttgtctttggtttacctctggaaagaagagataattacacaaaagccgaggaaattttgagtagatccatagtgaaacggtgggcaaattttgcaaaatatgggaatccaaatgagactcagaacaatagcacaagctggcctgtcttcaaaagcactgaacaaaaatatctaaccttgaatacagagtcaacaagaataatgacgaaactacgtgctcaacaatgtcgattctggacatcattttttccaaaagtcttggaaatgacaggaaatattgatgaagcagaatgggagtggaaagcaggattccatcgctggaacaattacatgatggactggaaaaatcaatttaacgattacactagcaagaaagaaagttgtgtgggtctc

SEQ ID NO: 6 - protein, 574 aa, Artificial Sequence
  synthetic butyrylcholinesterase variant
  VARIANT 227: Xaa = Ala
EDDIIIATKNGKVRGMNLTVFGGTVTAFLGIPYAQPPLGRLRFKKPQSLTKWSDIWNATKYANSCCQNIDQSFPGFHGSEMWNPNTDLSEDCLYLNVWIPAPKPKNATVLIWIYGGGFQTGTSSLHVYDGKFLARVERVIVVSMNYRVGALGFLALPGNPEAPGNMGLFDQQLALQWVQKNIAAFGGNPKSVTLFGESAGAASVSLHLLSPGSHSLFTRAILQSGSXNAPWAVTSLYEARNRTLNLAKLTGCSRENETEIIKCLRNKDPQEILLNEAFVVPYGTPQSVNFGPTVDGDFLTDMPDILLELGQFKKTQILVGVNKDEGTAFLVYGAPGFSKDNNSIITRKEFQEGLKIFFPGVSEFGKESILFHYTDWVDDQRPENYREALGDVVGDYNFICPALEFTKKFSEWGNNAFFYYFEHRSSKLPWPEWMGVMHGYEIEFVFGLPLERRDNYTKAEEILSRSIVKRWANFAKYGNPNETQNNSTSWPVFKSTEQKYLTLNTESTRIMTKLRAQQCRFWTSFFPKVLEMTGNIDEAEWEWKAGFHRWNNYMMDWKNQFNDYTSKKESCVGL

SEQ ID NO: 7 - DNA, 1722 bp, Artificial Sequence
  CDS (1)...(1722): synthetic butyrylcholinesterase variant
gaagatgacatcataattgcaacaaagaatggaaaagtcagagggatgaacttgacagtttttggtggcacggtaacagcctttcttggaattccctatgcacagccacctcttggtagacttcgattcaaaaagccacagtctctgaccaagtggtctgatatttggaatgccacaaaatatgcaaattcttgctgtcagaacatagatcaaagttttccaggcttccatggatcagagatgtggaacccaaacactgacctcagtgaagactgtttatatctaaatgtatggattccagcacctaaaccaaaaaatgccactgtattgatatggatttatggtggtggttttcaaactggaacatcatctttacatgtttatgatggcaagtttctggctcgggttgaaagagttattgtagtgtcaatgaactatagggtgggtgccctaggattcttagctttgccaggaaatcctgaggctccagggaacatgggtttatttgatcaacagttggctcttcagtgggttcaaaaaaatatagcagcctttggtggaaatcctaaaagtgtaactctctttggagaaagtgcaggagcagcttcagttagcctgcatttgctttctcctggaagccattcattgttcaccagagccattctgcaaagtggttccgckaatgctccttgggcggtaacatctctttatgaagctaggaacagaacgttgaacttagctaaattgactggttgctctagagagaatgagactgaaataatcaagtgtcttagaaataaagatccccaagaaattcttctgaatgaagcatttgttgtcccctatgggactccttcgtcagtaaactttggtccgaccgtggatggtgattttctcactgacatgccagacatattacttgaacttggacaatttaaaaaaacccagattttggtgggtgttaataaagatgaagggacagcttttttagtctatggtgctcctggcttcagcaaagataacaatagtatcataactagaaaagaatttcaggaaggtttaaaaatattttttccaggagtgagtgagtttggaaaggaatccatcctttttcattacacagactgggtagatgatcagagacctgaaaactaccgtgaggccttgggtgatgttgttggggattataatttcatatgccctgccttggagttcaccaagaagttctcagaatggggaaataatgcctttttctactattttgaacaccgatcctccaaacttccgtggccagaatggatgggagtgatgcatggctatgaaattgaatttgtctttggtttacctctggaaagaagagataattacacaaaagccgaggaaattttgagtagatccatagtgaaacggtgggcaaattttgcaaaatatgggaatccaaatgagactcagaacaatagcacaagctggcctgtcttcaaaagcactgaacaaaaatatctaaccttgaatacagagtcaacaagaataatgacgaaactacgtgctcaacaatgtcgattctggacatcattttttccaaaagtcttggaaatgacaggaaatattgatgaagcagaatgggagtggaaagcaggattccatcgctggaacaattacatgatggactggaaaaatcaatttaacgattacactagcaagaaagaaagttgtgtgggtctc

SEQ ID NO: 8 - protein, 574 aa, Artificial Sequence
  synthetic butyrylcholinesterase variant
  VARIANT 227: Xaa = Ala
EDDIIIATKNGKVRGMNLTVFGGTVTAFLGIPYAQPPLGRLRFKKPQSLTKWSDIWNATKYANSCCQNIDQSFPGFHGSEMWNPNTDLSEDCLYLNVWIPAPKPKNATVLIWIYGGGFQTGTSSLHVYDGKFLARVERVIVVSMNYRVGALGFLALPGNPEAPGNMGLFDQQLALQWVQKNIAAFGGNPKSVTLFGESAGAASVSLHLLSPGSHSLFTRAILQSGSXNAPWAVTSLYEARNRTLNLAKLTGCSRENETEIIKCLRNKDPQEILLNEAFVVPYGTPSSVNFGPTVDGDFLTDMPDILLELGQFKKTQILVGVNKDEGTAFLVYGAPGFSKDNNSIITRKEFQEGLKIFFPGVSEFGKESILFHYTDWVDDQRPENYREALGDVVGDYNFICPALEFTKKFSEWGNNAFFYYFEHRSSKLPWPEWMGVMHGYEIEFVFGLPLERRDNYTKAEEILSRSIVKRWANFAKYGNPNETQNNSTSWPVFKSTEQKYLTLNTESTRIMTKLRAQQCRFWTSFFPKVLEMTGNIDEAEWEWKAGFHRWNNYMMDWKNQFNDYTSKKESCVGL

SEQ ID NO: 9 - DNA, 1722 bp, Artificial Sequence
  CDS (1)...(1722): synthetic butyrylcholinesterase variant
gaagatgacatcataattgcaacaaagaatggaaaagtcagagggatgaacttgacagtttttggtggcacggtaacagcctttcttggaattccctatgcacagccacctcttggtagacttcgattcaaaaagccacagtctctgaccaagtggtctgatatttggaatgccacaaaatatgcaaattcttgctgtcagaacatagatcaaagttttccaggcttccatggatcagagatgtggaacccaaacactgacctcagtgaagactgtttatatctaaatgtatggattccagcacctaaaccaaaaaatgccactgtattgatatggatttatggtggtggttttcaaactggaacatcatctttacatgtttatgatggcaagtttctggctcgggttgaaagagttattgtagtgtcaatgaactatagggtgggtgccctaggattcttagctttgccaggaaatcctgaggctccagggaacatgggtttatttgatcaacagttggctcttcagtgggttcaaaaaaatatagcagcctttggtggaaatcctaaaagtgtaactctctttggagaaagtgcaggagcagcttcagttagcctgcatttgctttctcctggaagccattcattgttcaccagagccattctgcaaagtggttccgckaatgctccttgggcggtaacatctctttatgaagctaggaacagaacgttgaacttagctaaattgactggttgctctagagagaatgagactgaaataatcaagtgtcttagaaataaagatccccaagaaattcttctgaatgaagcatttgttgtcccctatgggactcctcattcagtaaactttggtccgaccgtggatggtgattttctcactgacatgccagacatattacttgaacttggacaatttaaaaaaacccagattttggtgggtgttaataaagatgaagggacagcttttttagtctatggtgctcctggcttcagcaaagataacaatagtatcataactagaaaagaatttcaggaaggtttaaaaatattttttccaggagtgagtgagtttggaaaggaatccatcctttttcattacacagactgggtagatgatcagagacctgaaaactaccgtgaggccttgggtgatgttgttggggattataatttcatatgccctgccttggagttcaccaagaagttctcagaatggggaaataatgcctttttctactattttgaacaccgatcctccaaacttccgtggccagaatggatgggagtgatgcatggctatgaaattgaatttgtctttggtttacctctggaaagaagagataattacacaaaagccgaggaaattttgagtagatccatagtgaaacggtgggcaaattttgcaaaatatgggaatccaaatgagactcagaacaatagcacaagctggcctgtcttcaaaagcactgaacaaaaatatctaaccttgaatacagagtcaacaagaataatgacgaaactacgtgctcaacaatgtcgattctggacatcattttttccaaaagtcttggaaatgacaggaaatattgatgaagcagaatgggagtggaaagcaggattccatcgctggaacaattacatgatggactggaaaaatcaatttaacgattacactagcaagaaagaaagttgtgtgggtctc

SEQ ID NO: 10 - protein, 574 aa, Artificial Sequence
  synthetic butyrylcholinesterase variant
  VARIANT 227: Xaa = Ala
EDDIIIATKNGKVRGMNLTVFGGTVTAFLGIPYAQPPLGRLRFKKPQSLTKWSDIWNATKYANSCCQNIDQSFPGFHGSEMWNPNTDLSEDCLYLNVWIPAPKPKNATVLIWIYGGGFQTGTSSLHVYDGKFLARVERVIVVSMNYRVGALGFLALPGNPEAPGNMGLFDQQLALQWVQKNIAAFGGNPKSVTLFGESAGAASVSLHLLSPGSHSLFTRAILQSGSXNAPWAVTSLYEARNRTLNLAKLTGCSRENETEIIKCLRNKDPQEILLNEAFVVPYGTPHSVNFGPTVDGDFLTDMPDILLELGQFKKTQILVGVNKDEGTAFLVYGAPGFSKDNNSIITRKEFQEGLKIFFPGVSEFGKESILFHYTDWVDDQRPENYREALGDVVGDYNFICPALEFTKKFSEWGNNAFFYYFEHRSSKLPWPEWMGVMHGYEIEFVFGLPLERRDNYTKAEEILSRSIVKRWANFAKYGNPNETQNNSTSWPVFKSTEQKYLTLNTESTRIMTKLRAQQCRFWTSFFPKVLEMTGNIDEAEWEWKAGFHRWNNYMMDWKNQFNDYTSKKESCVGL

SEQ ID NO: 11 - DNA, 1722 bp, Artificial Sequence
  CDS (1)...(1722): synthetic butyrylcholinesterase variant
gaagatgacatcataattgcaacaaagaatggaaaagtcagagggatgaacttgacagtttttggtggcacggtaacagcctttcttggaattccctatgcacagccacctcttggtagacttcgattcaaaaagccacagtctctgaccaagtggtctgatatttggaatgccacaaaatatgcaaattcttgctgtcagaacatagatcaaagttttccaggcttccatggatcagagatgtggaacccaaacactgacctcagtgaagactgtttatatctaaatgtatggattccagcacctaaaccaaaaaatgccactgtattgatatggatttatggtggtggttttcaaactggaacatcatctttacatgtttatgatggcaagtttctggctcgggttgaaagagttattgtagtgtcaatgaactatagggtgggtgccctaggattcttagctttgccaggaaatcctgaggctccagggaacatgggtttatttgatcaacagttggctcttcagtgggttcaaaaaaatatagcagcctttggtggaaatcctaaaagtgtaactctctttggagaaagtgcaggagcagcttcagttagcctgcatttgctttctcctggaagccattcattgttcaccagagccattctgcaaagtggttccgcgaatgctccttgggcggtaacatctctttatgaagctaggaacagaacgttgaacttagctaaattgactggttgctctagagagaatgagactgaaataatcaagtgtcttagaaataaagatccccaagaaattcttctgaatgaagcatttgttgtcccctatgggactccttggtcagtaaactttggtccgaccgtggatggtgattttctcactgacatgccagacatattacttgaacttggacaatttaaaaaaacccagattttggtgggtgttaataaagatgaagggacagcttttttagtctatggtgctcctggcttcagcaaagataacaatagtatcataactagaaaagaatttcaggaaggtttaaaaatattttttccaggagtgagtgagtttggaaaggaatccatcctttttcattacacagactgggtagatgatcagagacctgaaaactaccgtgaggccttgggtgatgttgttggggattataatttcatatgccctgccttggagttcaccaagaagttctcagaatggggaaataatgcctttttctactattttgaacaccgatcctccaaacttccgtggccagaatggatgggagtgatgcatggctatgaaattgaatttgtctttggtttacctctggaaagaagagataattacacaaaagccgaggaaattttgagtagatccatagtgaaacggtgggcaaattttgcaaaatatgggaatccaaatgagactcagaacaatagcacaagctggcctgtcttcaaaagcactgaacaaaaatatctaaccttgaatacagagtcaacaagaataatgacgaaactacgtgctcaacaatgtcgattctggacatcattttttccaaaagtcttggaaatgacaggaaatattgatgaagcagaatgggagtggaaagcaggattccatcgctggaacaattacatgatggactggaaaaatcaatttaacgattacactagcaagaaagaaagttgtgtgggtctc

SEQ ID NO: 12 - protein, 574 aa, Artificial Sequence
  synthetic butyrylcholinesterase variant
EDDIIIATKNGKVRGMNLTVFGGTVTAFLGIPYAQPPLGRLRFKKPQSLTKWSDIWNATKYANSCCQNIDQSFPGFHGSEMWNPNTDLSEDCLYLNVWIPAPKPKNATVLIWIYGGGFQTGTSSLHVYDGKFLARVERVIVVSMNYRVGALGFLALPGNPEAPGNMGLFDQQLALQWVQKNIAAFGGNPKSVTLFGESAGAASVSLHLLSPGSHSLFTRAILQSGSANAPWAVTSLYEARNRTLNLAKLTGCSRENETEIIKCLRNKDPQEILLNEAFVVPYGTPWSVNFGPTVDGDFLTDMPDILLELGQFKKTQILVGVNKDEGTAFLVYGAPGFSKDNNSIITRKEFQEGLKIFFPGVSEFGKESILFHYTDWVDDQRPENYREALGDVVGDYNFICPALEFTKKFSEWGNNAFFYYFEHRSSKLPWPEWMGVMHGYEIEFVFGLPLERRDNYTKAEEILSRSIVKRWANFAKYGNPNETQNNSTSWPVFKSTEQKYLTLNTESTRIMTKLRAQQCRFWTSFFPKVLEMTGNIDEAEWEWKAGFHRWNNYMMDWKNQFNDYTSKKESCVGL

SEQ ID NO: 13 - DNA, 1722 bp, Artificial Sequence
  CDS (1)...(1722): synthetic butyrylcholinesterase variant
gaagatgacatcataattgcaacaaagaatggaaaagtcagagggatgaacttgacagtttttggtggcacggtaacagcctttcttggaattccctatgcacagccacctcttggtagacttcgattcaaaaagccacagtctctgaccaagtggtctgatatttggaatgccacaaaatatgcaaattcttgctgtcagaacatagatcaaagttttccaggcttccatggatcagagatgtggaacccaaacactgacctcagtgaagactgtttatatctaaatgtatggattccagcacctaaaccaaaaaatgccactgtattgatatggatttatggtggtggttttcaaactggaacatcatctttacatgtttatgatggcaagtttctggctcgggttgaaagagttattgtagtgtcaatgaactatagggtgggtgccctaggattcttagctttgccaggaaatcctgaggctccagggaacatgggtttatttgatcaacagttggctcttcagtgggttcaaaaaaatatagcagcctttggtggaaatcctaaaagtgtaactctctttggagaaagtgcaggagcagcttcagttagcctgcatttgctttctcctggaagccattcattgttcaccagagccattctgcaaagtggttccgcgaatgctccttgggcggtaacatctctttatgaagctaggaacagaacgttgaacttagctaaattgactggttgctctagagagaatgagactgaaataatcaagtgtcttagaaataaagatccccaagaaattcttctgaatgaagcatttgttgtcccctatgggactcctttgcckgtaaactttggtccgaccgtggatggtgattttctcactgacatgccagacatattacttgaacttggacaatttaaaaaaacccagattttggtgggtgttaataaagatgaagggacagcttttttagtctatggtgctcctggcttcagcaaagataacaatagtatcataactagaaaagaatttcaggaaggtttaaaaatattttttccaggagtgagtgagtttggaaaggaatccatcctttttcattacacagactgggtagatgatcagagacctgaaaactaccgtgaggccttgggtgatgttgttggggattataatttcatatgccctgccttggagttcaccaagaagttctcagaatggggaaataatgcctttttctactattttgaacaccgatcctccaaacttccgtggccagaatggatgggagtgatgcatggctatgaaattgaatttgtctttggtttacctctggaaagaagagataattacacaaaagccgaggaaattttgagtagatccatagtgaaacggtgggcaaattttgcaaaatatgggaatccaaatgagactcagaacaatagcacaagctggcctgtcttcaaaagcactgaacaaaaatatctaaccttgaatacagagtcaacaagaataatgacgaaactacgtgctcaacaatgtcgattctggacatcattttttccaaaagtcttggaaatgacaggaaatattgatgaagcagaatgggagtggaaagcaggattccatcgctggaacaattacatgatggactggaaaaatcaatttaacgattacactagcaagaaagaaagttgtgtgggtctc

SEQ ID NO: 14 - protein, 574 aa, Artificial Sequence
  synthetic butyrylcholinesterase variant
  VARIANT 227: Xaa = Ala
  VARIANT 287: Xaa = Pr0
EDDIIIATKNGKVRGMNLTVFGGTVTAFLGIPYAQPPLGRLRFKKPQSLTKWSDIWNATKYANSCCQNIDQSFPGFHGSEMWNPNTDLSEDCLYLNVWIPAPKPKNATVLIWIYGGGFQTGTSSLHVYDGKFLARVERVIVVSMNYRVGALGFLALPGNPEAPGNMGLFDQQLALQWVQKNIAAFGGNPKSVTLFGESAGAASVSLHLLSPGSHSLFTRAILQSGSANAPWAVTSLYEARNRTLNLAKLTGCSRENETEIIKCLRNKDPQEILLNEAFVVPYGTPLXVNFGPTVDGDFLTDMPDILLELGQFKKTQILVGVNKDEGTAFLVYGAPGFSKDNNSIITRKEFQEGLKIFFPGVSEFGKESILFHYTDWVDDQRPENYREALGDVVGDYNFICPALEFTKKFSEWGNNAFFYYFEHRSSKLPWPEWMGVMHGYEIEFVFGLPLERRDNYTKAEEILSRSIVKRWANFAKYGNPNETQNNSTSWPVFKSTEQKYLTLNTESTRIMTKLRAQQCRFWTSFFPKVLEMTGNIDEAEWEWKAGFHRWNNYMMDWKNQFNDYTSKKESCVGL

SEQ ID NO: 15 - DNA, 1722 bp, Artificial Sequence
  CDS (1)...(1722): synthetic butyrylcholinesterase variant
gaagatgacatcataattgcaacaaagaatggaaaagtcagagggatgaacttgacagtttttggtggcacggtaacagcctttcttggaattccctatgcacagccacctcttggtagacttcgattcaaaaagccacagtctctgaccaagtggtctgatatttggaatgccacaaaatatgcaaattcttgctgtcagaacatagatcaaagttttccaggcttccatggatcagagatgtggaacccaaacactgacctcagtgaagactgtttatatctaaatgtatggattccagcacctaaaccaaaaaatgccactgtattgatatggatttatggtggtggttttcaaactggaacatcatctttacatgtttatgatggcaagtttctggctcgggttgaaagagttattgtagtgtcaatgaactatagggtgggtgccctaggattcttagctttgccaggaaatcctgaggctccagggaacatgggtttatttgatcaacagttggctcttcagtgggttcaaaaaaatatagcagcctttggtggaaatcctaaaagtgtaactctctttggagaaagtgcaggagcagcttcagttagcctgcatttgctttctcctggaagccattcattgttcaccagagccattctgcaaagtggttccgcgaatgctccttgggcggtaacatctctttatgaagctaggaacagaacgttgaacttagctaaattgactggttgctctagagagaatgagactgaaataatcaagtgtcttagaaataaagatccccaagaaattcttctgaatgaagcatttgttgtcccctatgggactcctttgggtgtaaactttggtccgaccgtggatggtgattttctcactgacatgccagacatattacttgaacttggacaatttaaaaaaacccagattttggtgggtgttaataaagatgaagggacatggtttttagtcatgggtgctcctggcttcagcaaagataacaatagtatcataactagaaaagaatttcaggaaggtttaaaaatattttttccaggagtgagtgagtttggaaaggaatccatcctttttcattacacagactgggtagatgatcagagacctgaaaactaccgtgaggccttgggtgatgttgttggggattataatttcatatgccctgccttggagttcaccaagaagttctcagaatggggaaataatgcctttttctactattttgaacaccgatcctccaaacttccgtggccagaatggatgggagtgatgcatggctatgaaattgaatttgtctttggtttacctctggaaagaagagataattacacaaaagccgaggaaattttgagtagatccatagtgaaacggtgggcaaattttgcaaaatatgggaatccaaatgagactcagaacaatagcacaagctggcctgtcttcaaaagcactgaacaaaaatatctaaccttgaatacagagtcaacaagaataatgacgaaactacgtgctcaacaatgtcgattctggacatcattttttccaaaagtcttggaaatgacaggaaatattgatgaagcagaatgggagtggaaagcaggattccatcgctggaacaattacatgatggactggaaaaatcaatttaacgattacactagcaagaaagaaagttgtgtgggtctc

SEQ ID NO: 16 - protein, 574 aa, Artificial Sequence
  synthetic butyrylcholinesterase variant
EDDIIIATKNGKVRGMNLTVFGGTVTAFLGIPYAQPPLGRLRFKKPQSLTKWSDIWNATKYANSCCQNIDQSFPGFHGSEMWNPNTDLSEDCLYLNVWIPAPKPKNATVLIWIYGGGFQTGTSSLHVYDGKFLARVERVIVVSMNYRVGALGFLALPGNPEAPGNMGLFDQQLALQWVQKNIAAFGGNPKSVTLFGESAGAASVSLHLLSPGSHSLFTRAILQSGSANAPWAVTSLYEARNRTLNLAKLTGCSRENETEIIKCLRNKDPQEILLNEAFVVPYGTPLGVNFGPTVDGDFLTDMPDILLELGQFKKTQILVGVNKDEGTWFLVMGAPGFSKDNNSIITRKEFQEGLKIFFPGVSEFGKESILFHYTDWVDDQRPENYREALGDVVGDYNFICPALEFTKKFSEWGNNAFFYYFEHRSSKLPWPEWMGVMHGYEIEFVFGLPLERRDNYTKAEEILSRSIVKRWANFAKYGNPNETQNNSTSWPVFKSTEQKYLTLNTESTRIMTKLRAQQCRFWTSFFPKVLEMTGNIDEAEWEWKAGFHRWNNYMMDWKNQFNDYTSKKESCVGL

SEQ ID NO: 17 - DNA, 711 bp, Artificial Sequence
  CDS (1)...(711): synthetic butyrylcholinesterase variant
atggacatgagggtccccgctcagctcctggggctcctgctgctctggctcccaggtgccaaatgtgacatcttgctgactcagtctccagtcatcctgtctgtgagtccaggagaaagagtcagtttctcctgcagggccagtcagagtattggcacaaacatacactggtatcagcaaagaacaaatggttctccaaggcttctcataaagtatgcttctgagtctatctctgggatcccttccaggtttagtggcagtggatcagggacagattttactcttagcatcaacagtgtggagtctgaagatattgcagattattactgtcaacaaaataataactggccaaccacgttcggtgctgggaccaagctggagctgaaacgaactgtggctgcaccatctgtcttcatcttcccgccatctgatgagcagttgaaatctggaactgcctctgttgtgtgcctgctgaataacttctatcccagagaggccaaagtacagtggaaggtggataacgccctccaatcgggtaactcccaggagagtgtcacagagcaggacagcaaggacagcacctacagcctcagcagcaccctgacgctgagcaaagcagactacgagaaacacaaagtctacgcctgcgaagtcacccatcagggcctgagctcgcccgtcacaaagagcttcaacaggggagagtgttag

SEQ ID NO: 18 - protein, 236 aa, Artificial Sequence
  synthetic butyrylcholinesterase variant
MDMRVPAQLLGLLLLWLPGAKCDILLTQSPVILSVSPGERVSFSCRASQSIGTNIHWYQQRTNGSPRLLIKYASESISGIPSRFSGSGSGTDFTLSINSVESEDIADYYCQQNNNWPTTFGAGTKLELKRTVAAPSVFIFPPSDEQLKSGTASVVCLLNNFYPREAKVQWKVDNALQSGNSQESVTEQDSKDSTYSLSSTLTLSKADYEKHKVYACEVTHQGLSSPVTKSFNRGEC

SEQ ID NO: 19 - DNA, 2349 bp, Mus musculus
  CDS (1)...(2349)
atgggatggagctgtatcatcctcttcttggtagcaacagctacaggtgtccactcccaggtgcagctgaagcagtcaggacctggcctagtgcagccctcacagagcctgtccatcacctgcacagtctctggtttctcattaactaactatggtgtacactgggttcgccagtctccaggaaagggtctggagtggctgggagtgatatggagtggtggaaacacagactataatacacctttcacatccagactgagcatcaacaaggacaattccaagagccaagttttctttaaaatgaacagtctgcaatctaatgacacagccatatattactgtgccagagccctcacctactatgattacgagtttgcttactggggccaagggactctggtcactgtctctgcagcctccaccaagggcccatcggtcttccccctggcaccctcctccaagagcacctctgggggcacagcggccctgggctgcctggtcaaggactacttccccgaaccggtgacggtgtcgtggaactcaggcgccctgaccagcggcgtgcacaccttcccggctgtcctacagtcctcaggactctactccctcagcagcgtggtgaccgtgccctccagcagcttgggcacccagacctacatctgcaacgtgaatcacaagcccagcaacaccaaggtggacaagaaagcagagcccaaatcttgtgacaaaactcacacatgtccaccgtgtccaaagcttgaagatgacatcataattgcaacaaagaatggaaaagtcagagggatgaacttgacagtttttggtggcacggtaacagcctttcttggaattccctatgcacagccacctcttggtagacttcgattcaaaaagccacagtctctgaccaagtggtctgatatttggaatgccacaaaatatgcaaattcttgctgtcagaacatagatcaaagttttccaggcttccatggatcagagatgtggaacccaaacactgacctcagtgaagactgtttatatctaaatgtatggattccagcacctaaaccaaaaaatgccactgtattgatatggatttatggtggtggttttcaaactggaacatcatctttacatgtttatgatggcaagtttctggctcgggttgaaagagttattgtagtgtcaatgaactatagggtgggtgccctaggattcttagctttgccaggaaatcctgaggctccagggaacatgggtttatttgatcaacagttggctcttcagtgggttcaaaaaaatatagcagcctttggtggaaatcctaaaagtgtaactctctttggagaaagtgcaggagcagcttcagttagcctgcatttgctttctcctggaagccattcattgttcaccagagccattctgcaaagtggttcctttaatgctccttgggcggtaacatctctttatgaagctaggaacagaacgttgaacttagctaaattgactggttgctctagagagaatgagactgaaataatcaagtgtcttagaaataaagatccccaagaaattcttctgaatgaagcatttgttgtcccctatgggactcctttgtcagtaaactttggtccgaccgtggatggtgattttctcactgacatgccagacatattacttgaacttggacaatttaaaaaaacccagattttggtgggtgttaataaagatgaagggacagcttttttagtctatggtgctcctggcttcagcaaagataacaatagtatcataactagaaaagaatttcaggaaggtttaaaaatattttttccaggagtgagtgagtttggaaaggaatccatcctttttcattacacagactgggtagatgatcagagacctgaaaactaccgtgaggccttgggtgatgttgttggggattataatttcatatgccctgccttggagttcaccaagaagttctcagaatggggaaataatgcctttttctactattttgaacaccgatcctccaaacttccgtggccagaatggatgggagtgatgcatggctatgaaattgaatttgtctttggtttacctctggaaagaagagataattacacaaaagccgaggaaattttgagtagatccatagtgaaacggtgggcaaattttgcaaaatatgggaatccaaatgagactcagaacaatagcacaagctggcctgtcttcaaaagcactgaacaaaaatatctaaccttgaatacagagtcaacaagaataatgacgaaactacgtgctcaacaatgtcgattctggacatcattttttccaaaagtctga

SEQ ID NO: 20 - protein, 782 aa, Mus musculus
MGWSCIILFLVATATGVHSQVQLKQSGPGLVQPSQSLSITCTVSGFSLTNYGVHWVRQSPGKGLEWLGVIWSGGNTDYNTPFTSRLSINKDNSKSQVFFKMNSLQSNDTAIYYCARALTYYDYEFAYWGQGTLVTVSAASTKGPSVFPLAPSSKSTSGGTAALGCLVKDYFPEPVTVSWNSGALTSGVHTFPAVLQSSGLYSLSSVVTVPSSSLGTQTYICNVNHKPSNTKVDKKAEPKSCDKTHTCPPCPKLEDDIIIATKNGKVRGMNLTVFGGTVTAFLGIPYAQPPLGRLRFKKPQSLTKWSDIWNATKYANSCCQNIDQSFPGFHGSEMWNPNTDLSEDCLYLNVWIPAPKPKNATVLIWIYGGGFQTGTSSLHVYDGKFLARVERVIVVSMNYRVGALGFLALPGNPEAPGNMGLFDQQLALQWVQKNIAAFGGNPKSVTLFGESAGAASVSLHLLSPGSHSLFTRAILQSGSFNAPWAVTSLYEARNRTLNLAKLTGCSRENETEIIKCLRNKDPQEILLNEAFVVPYGTPLSVNFGPTVDGDFLTDMPDILLELGQFKKTQILVGVNKDEGTAFLVYGAPGFSKDNNSIITRKEFQEGLKIFFPGVSEFGKESILFHYTDWVDDQRPENYREALGDVVGDYNFICPALEFTKKFSEWGNNAFFYYFEHRSSKLPWPEWMGVMHGYEIEFVFGLPLERRDNYTKAEEILSRSIVKRWANFAKYGNPNETQNNSTSWPVFKSTEQKYLTLNTESTRIMTKLRAQQCRFWTSFFPKV

SEQ ID NO: 21 - DNA, 1722 bp, Artificial Sequence
  CDS (1)...(1722): synthetic butyrylcholinesterase variant
gaagatgacatcataattgcaacaaagaatggaaaagtcagagggatgaacttgacagtttttggtggcacggtaacagcctttcttggaattccctatgcacagccacctcttggtagacttcgattcaaaaagccacagtctctgaccaagtggtctgatatttggaatgccacaaaatatgcaaattcttgctgtcagaacatagatcaaagttttccaggcttccatggatcagagatgtggaacccaaacactgacctcagtgaagactgtttatatctaaatgtatggattccagcacctaaaccaaaaaatgccactgtattgatatggatttatggtggtggttttcaaactggaacatcatctttacatgtttatgatggcaagtttctggctcgggttgaaagagttattgtagtgtcaatgaactatagggtgggtgccctaggattcttagctttgccaggaaatcctgaggctccagggaacatgggtttatttgatcaacagttggctcttcagtgggttcaaaaaaatatagcagcctttggtggaaatcctaaaagtgtaactctctttggagaaagtgcaggagcagcttcagttagcctgcatttgctttctcctggaagccattcattgttcaccagagccattctgcaaagtggttcctttaatgctccttgggcggtaacatctctttatgaagctaggaacagaacgttgaacttagctaaattgactggttgctctagagagaatgagactgaaataatcaagtgtcttagaaataaagatccccaagaaattcttctgaatgaagcatttgttgtcccctatgggactcctttgtcagtaaactttggtccgaccgtggatggtgattttctcactgacatgccagacatattacttgaacttggacaatttaaaaaaacccagattttggtgggtgttaataaagatgaagggacagcttttttagtctatggtgctcctggcttcagcaaagataacaatagtatcataactagaaaagaatttcaggaaggtttaaaaatattttttccaggagtgagtgagtttggaaaggaatccatcctttttcattacacagactgggtagatgatcagagacctgaaaactaccgtgaggccttgggtgatgttgttggggattataatttcatatgccctgccttggagttcaccaagaagttctcagaatggggaaataatgcctttttctactattttgaacaccgatcctccaaacttccgtggccagaatggatgggagtgatgcatggctatgaaattgaatttgtctttggtttacctctggaaagaagagataattacacaaaagccgaggaaattttgagtagatccatagtgaaacggtgggcaaattttgcaaaatatgggaatccaaatgagactcagaacaatagcacaagctggcctgtcttcaaaagcactgaacaaaaatatctaaccttgaatacagagtcaacaagaataatgacgaaactacgtgctcaacaatgtcgattctggacatcattttttccaaaagtcttggaaatgacaggaaatattgatgaagcagaatgggagtggaaagcaggattccatcgctggaacaattacatgatggactggaaaaatcaatttaacgattacactagcaagaaagaaagttgtgtgggtctc

SEQ ID NO: 22 - protein, 574 aa, Artificial Sequence
  synthetic butyrylcholinesterase variant
EDDIIIATKNGKVRGMNLTVFGGTVTAFLGIPYAQPPLGRLRFKKPQSLTKWSDIWNATKYANSCCQNIDQSFPGFHGSEMWNPNTDLSEDCLYLNVWIPAPKPKNATVLIWIYGGGFQTGTSSLHVYDGKFLARVERVIVVSMNYRVGALGFLALPGNPEAPGNMGLFDQQLALQWVQKNIAAFGGNPKSVTLFGESAGAASVSLHLLSPGSHSLFTRAILQSGSFNAPWAVTSLYEARNRTLNLAKLTGCSRENETEIIKCLRNKDPQEILLNEAFVVPYGTPLSVNFGPTVDGDFLTDMPDILLELGQFKKTQILVGVNKDEGTAFLVYGAPGFSKDNNSIITRKEFQEGLKIFFPGVSEFGKESILFHYTDWVDDQRPENYREALGDVVGDYNFICPALEFTKKFSEWGNNAFFYYFEHRSSKLPWPEWMGVMHGYEIEFVFGLPLERRDNYTKAEEILSRSIVKRWANFAKYGNPNETQNNSTSWPVFKSTEQKYLTLNTESTRIMTKLRAQQCRFWTSFFPKVLEMTGNIDEAEWEWKAGFHRWNNYMMDWKNQFNDYTSKKESCVGL

SEQ ID NO: 23 - DNA, 1722 bp, Artificial Sequence
  CDS (1)...(1722): synthetic butyrylcholinesterase variant
gaagatgacatcataattgcaacaaagaatggaaaagtcagagggatgaacttgacagtttttggtggcacggtaacagcctttcttggaattccctatgcacagccacctcttggtagacttcgattcaaaaagccacagtctctgaccaagtggtctgatatttggaatgccacaaaatatgcaaattcttgctgtcagaagatagatcaaagttttccaggcttccatggatcagagatgtggaacccaaacactgacctcagtgaagactgtttatatctaaatgtatggattccagcacctaaaccaaaaaatgccactgtattgatatggatttatggtggtggttttcaaactggaacatcatctttacatgtttatgatggcaagtttctggctcgggttgaaagagttattgtagtgtcaatgaactatagggtgggtgccctaggattcttagctttgccaggaaatcctgaggctccagggaacatgggtttatttgatcaacagttggctcttcagtgggttcaaaaaaatatagcagcctttggtggaaatcctaaaagtgtaactctctttggagaaagtgcaggagcagcttcagttagcctgcatttgctttctcctggaagccattcattgttcaccagagccattctgcaaagtggttccgckaatgctccttgggcggtaacatctctttatgaagctaggaacagaacgttgaacttagctaaattgactggttgctctagagagaatgagactgaaataatcaagtgtcttagaaataaagatccccaagaaattcttctgaatgaagcatttgttgtcccctatgggactcctttgtcagtaaactttggtccgaccgtggatggtgattttctcactgacatgccagacatattacttgaacttggacaatttaaaaaaacccagattttggtgggtgttaataaagatgaagggacagcttttttagtctatggtgctcctggcttcagcaaagataacaatagtatcataactagaaaagaatttcaggaaggtttaaaaatattttttccaggagtgagtgagtttggaaaggaatccatcctttttcattacacagactgggtagatgatcagagacctgaaaactaccgtgaggccttgggtgatgttgttggggattataatttcatatgccctgccttggagttcaccaagaagttctcagaatggggaaataatgcctttttctactattttgaacaccgatcctccaaacttccgtggccagaatggatgggagtgatgcatggctatgaaattgaatttgtctttggtttacctctggaaagaagagataattacacaaaagccgaggaaattttgagtagatccatagtgaaacggtgggcaaattttgcaaaatatgggaatccaaatgagactcagaacaatagcacaagctggcctgtcttcaaaagcactgaacaaaaatatctaaccttgaatacagagtcaacaagaataatgacgaaactacgtgctcaacaatgtcgattctggacatcattttttccaaaagtcttggaaatgacaggaaatattgatgaagcagaatgggagtggaaagcaggattccatcgctggaacaattacatgatggactggaaaaatcaatttaacgattacactagcaagaaagaaagttgtgtgggtctc

SEQ ID NO: 24 - protein, 574 aa, Artificial Sequence
  synthetic butyrylcholinesterase variant
  VARIANT 227: Xaa = Ala
EDDIIIATKNGKVRGMNLTVFGGTVTAFLGIPYAQPPLGRLRFKKPQSLTKWSDIWNATKYANSCCQKIDQSFPGFHGSEMWNPNTDLSEDCLYLNVWIPAPKPKNATVLIWIYGGGFQTGTSSLHVYDGKFLARVERVIVVSMNYRVGALGFLALPGNPEAPGNMGLFDQQLALQWVQKNIAAFGGNPKSVTLFGESAGAASVSLHLLSPGSHSLFTRAILQSGSXNAPWAVTSLYEARNRTLNLAKLTGCSRENETEIIKCLRNKDPQEILLNEAFVVPYGTPLSVNFGPTVDGDFLTDMPDILLELGQFKKTQILVGVNKDEGTAFLVYGAPGFSKDNNSIITRKEFQEGLKIFFPGVSEFGKESILFHYTDWVDDQRPENYREALGDVVGDYNFICPALEFTKKFSEWGNNAFFYYFEHRSSKLPWPEWMGVMHGYEIEFVFGLPLERRDNYTKAEEILSRSIVKRWANFAKYGNPNETQNNSTSWPVFKSTEQKYLTLNTESTRIMTKLRAQQCRFWTSFFPKVLEMTGNIDEAEWEWKAGFHRWNNYMMDWKNQFNDYTSKKESCVGL

SEQ ID NO: 25 - DNA, 1722 bp, Artificial Sequence
  CDS (1)...(1722): synthetic butyrylcholinesterase variant
gaagatgacatcataattgcaacaaagaatggaaaagtcagagggatgaacttgacagtttttggtggcacggtaacagcctttcttggaattccctatgcacagccacctcttggtagacttcgattcaaaaagccacagtctctgaccaagtggtctgatatttggaatgccacaaaatatgcaaattcttgctgtcagcggatagatcaaagttttccaggcttccatggatcagagatgtggaacccaaacactgacctcagtgaagactgtttatatctaaatgtatggattccagcacctaaaccaaaaaatgccactgtattgatatggatttatggtggtggttttcaaactggaacatcatctttacatgtttatgatggcaagtttctggctcgggttgaaagagttattgtagtgtcaatgaactatagggtgggtgccctaggattcttagctttgccaggaaatcctgaggctccagggaacatgggtttatttgatcaacagttggctcttcagtgggttcaaaaaaatatagcagcctttggtggaaatcctaaaagtgtaactctctttggagaaagtgcaggagcagcttcagttagcctgcatttgctttctcctggaagccattcattgttcaccagagccattctgcaaagtggttccgckaatgctccttgggcggtaacatctctttatgaagctaggaacagaacgttgaacttagctaaattgactggttgctctagagagaatgagactgaaataatcaagtgtcttagaaataaagatccccaagaaattcttctgaatgaagcatttgttgtcccctatgggactcctttgtcagtaaactttggtccgaccgtggatggtgattttctcactgacatgccagacatattacttgaacttggacaatttaaaaaaacccagattttggtgggtgttaataaagatgaagggacagcttttttagtctatggtgctcctggcttcagcaaagataacaatagtatcataactagaaaagaatttcaggaaggtttaaaaatattttttccaggagtgagtgagtttggaaaggaatccatcctttttcattacacagactgggtagatgatcagagacctgaaaactaccgtgaggccttgggtgatgttgttggggattataatttcatatgccctgccttggagttcaccaagaagttctcagaatggggaaataatgcctttttctactattttgaacaccgatcctccaaacttccgtggccagaatggatgggagtgatgcatggctatgaaattgaatttgtctttggtttacctctggaaagaagagataattacacaaaagccgaggaaattttgagtagatccatagtgaaacggtgggcaaattttgcaaaatatgggaatccaaatgagactcagaacaatagcacaagctggcctgtcttcaaaagcactgaacaaaaatatctaaccttgaatacagagtcaacaagaataatgacgaaactacgtgctcaacaatgtcgattctggacatcattttttccaaaagtcttggaaatgacaggaaatattgatgaagcagaatgggagtggaaagcaggattccatcgctggaacaattacatgatggactggaaaaatcaatttaacgattacactagcaagaaagaaagttgtgtgggtctc

SEQ ID NO: 26 - protein, 574 aa, Artificial Sequence
  synthetic butyrylcholinesterase variant
  VARIANT 227: Xaa = Ala
EDDIIIATKNGKVRGMNLTVFGGTVTAFLGIPYAQPPLGRLRFKKPQSLTKWSDIWNATKYANSCCQRIDQSFPGFHGSEMWNPNTDLSEDCLYLNVWIPAPKPKNATVLIWIYGGGFQTGTSSLHVYDGKFLARVERVIVVSMNYRVGALGFLALPGNPEAPGNMGLFDQQLALQWVQKNIAAFGGNPKSVTLFGESAGAASVSLHLLSPGSHSLFTRAILQSGSXNAPWAVTSLYEARNRTLNLAKLTGCSRENETEIIKCLRNKDPQEILLNEAFVVPYGTPLSVNFGPTVDGDFLTDMPDILLELGQFKKTQILVGVNKDEGTAFLVYGAPGFSKDNNSIITRKEFQEGLKIFFPGVSEFGKESILFHYTDWVDDQRPENYREALGDVVGDYNFICPALEFTKKFSEWGNNAFFYYFEHRSSKLPWPEWMGVMHGYEIEFVFGLPLERRDNYTKAEEILSRSIVKRWANFAKYGNPNETQNNSTSWPVFKSTEQKYLTLNTESTRIMTKLRAQQCRFWTSFFPKVLEMTGNIDEAEWEWKAGFHRWNNYMMDWKNQFNDYTSKKESCVGL

SEQ ID NO: 27 - DNA, 1722 bp, Artificial Sequence
  CDS (1)...(1722): synthetic butyrylcholinesterase variant
gaagatgacatcataattgcaacaaagaatggaaaagtcagagggatgaacttgacagtttttggtggcacggtaacagcctttcttggaattccctatgcacagccacctcttggtagacttcgattcaaaaagccacagtctctgaccaagtggtctgatatttggaatgccacaaaatatgcaaattcttgctgtcagaacatagggcaaagttttccaggcttccatggatcagagatgtggaacccaaacactgacctcagtgaagactgtttatatctaaatgtatggattccagcacctaaaccaaaaaatgccactgtattgatatggatttatggtggtggttttcaaactggaacatcatctttacatgtttatgatggcaagtttctggctcgggttgaaagagttattgtagtgtcaatgaactatagggtgggtgccctaggattcttagctttgccaggaaatcctgaggctccagggaacatgggtttatttgatcaacagttggctcttcagtgggttcaaaaaaatatagcagcctttggtggaaatcctaaaagtgtaactctctttggagaaagtgcaggagcagcttcagttagcctgcatttgctttctcctggaagccattcattgttcaccagagccattctgcaaagtggttccgckaatgctccttgggcggtaacatctctttatgaagctaggaacagaacgttgaacttagctaaattgactggttgctctagagagaatgagactgaaataatcaagtgtcttagaaataaagatccccaagaaattcttctgaatgaagcatttgttgtcccctatgggactcctttgtcagtaaactttggtccgaccgtggatggtgattttctcactgacatgccagacatattacttgaacttggacaatttaaaaaaacccagattttggtgggtgttaataaagatgaagggacagcttttttagtctatggtgctcctggcttcagcaaagataacaatagtatcataactagaaaagaatttcaggaaggtttaaaaatattttttccaggagtgagtgagtttggaaaggaatccatcctttttcattacacagactgggtagatgatcagagacctgaaaactaccgtgaggccttgggtgatgttgttggggattataatttcatatgccctgccttggagttcaccaagaagttctcagaatggggaaataatgcctttttctactattttgaacaccgatcctccaaacttccgtggccagaatggatgggagtgatgcatggctatgaaattgaatttgtctttggtttacctctggaaagaagagataattacacaaaagccgaggaaattttgagtagatccatagtgaaacggtgggcaaattttgcaaaatatgggaatccaaatgagactcagaacaatagcacaagctggcctgtcttcaaaagcactgaacaaaaatatctaaccttgaatacagagtcaacaagaataatgacgaaactacgtgctcaacaatgtcgattctggacatcattttttccaaaagtcttggaaatgacaggaaatattgatgaagcagaatgggagtggaaagcaggattccatcgctggaacaattacatgatggactggaaaaatcaatttaacgattacactagcaagaaagaaagttgtgtgggtctc

SEQ ID NO: 28 - protein, 574 aa, Artificial Sequence
  synthetic butyrylcholinesterase variant
  VARIANT 227: Xaa = Ala
EDDIIIATKNGKVRGMNLTVFGGTVTAFLGIPYAQPPLGRLRFKKPQSLTKWSDIWNATKYANSCCQNIGQSFPGFHGSEMWNPNTDLSEDCLYLNVWIPAPKPKNATVLIWIYGGGFQTGTSSLHVYDGKFLARVERVIVVSMNYRVGALGFLALPGNPEAPGNMGLFDQQLALQWVQKNIAAFGGNPKSVTLFGESAGAASVSLHLLSPGSHSLFTRAILQSGSXNAPWAVTSLYEARNRTLNLAKLTGCSRENETEIIKCLRNKDPQEILLNEAFVVPYGTPLSVNFGPTVDGDFLTDMPDILLELGQFKKTQILVGVNKDEGTAFLVYGAPGFSKDNNSIITRKEFQEGLKIFFPGVSEFGKESILFHYTDWVDDQRPENYREALGDVVGDYNFICPALEFTKKFSEWGNNAFFYYFEHRSSKLPWPEWMGVMHGYEIEFVFGLPLERRDNYTKAEEILSRSIVKRWANFAKYGNPNETQNNSTSWPVFKSTEQKYLTLNTESTRIMTKLRAQQCRFWTSFFPKVLEMTGNIDEAEWEWKAGFHRWNNYMMDWKNQFNDYTSKKESCVGL

SEQ ID NO: 29 - DNA, 1722 bp, Artificial Sequence
  CDS (1)...(1722): synthetic butyrylcholinesterase variant
gaagatgacatcataattgcaacaaagaatggaaaagtcagagggatgaacttgacagtttttggtggcacggtaacagcctttcttggaattccctatgcacagccacctcttggtagacttcgattcaaaaagccacagtctctgaccaagtggtctgatatttggaatgccacaaaatatgcaaattcttgctgtcagaacatacatcaaagttttccaggcttccatggatcagagatgtggaacccaaacactgacctcagtgaagactgtttatatctaaatgtatggattccagcacctaaaccaaaaaatgccactgtattgatatggatttatggtggtggttttcaaactggaacatcatctttacatgtttatgatggcaagtttctggctcgggttgaaagagttattgtagtgtcaatgaactatagggtgggtgccctaggattcttagctttgccaggaaatcctgaggctccagggaacatgggtttatttgatcaacagttggctcttcagtgggttcaaaaaaatatagcagcctttggtggaaatcctaaaagtgtaactctctttggagaaagtgcaggagcagcttcagttagcctgcatttgctttctcctggaagccattcattgttcaccagagccattctgcaaagtggttccgckaatgctccttgggcggtaacatctctttatgaagctaggaacagaacgttgaacttagctaaattgactggttgctctagagagaatgagactgaaataatcaagtgtcttagaaataaagatccccaagaaattcttctgaatgaagcatttgttgtcccctatgggactcctttgtcagtaaactttggtccgaccgtggatggtgattttctcactgacatgccagacatattacttgaacttggacaatttaaaaaaacccagattttggtgggtgttaataaagatgaagggacagcttttttagtctatggtgctcctggcttcagcaaagataacaatagtatcataactagaaaagaatttcaggaaggtttaaaaatattttttccaggagtgagtgagtttggaaaggaatccatcctttttcattacacagactgggtagatgatcagagacctgaaaactaccgtgaggccttgggtgatgttgttggggattataatttcatatgccctgccttggagttcaccaagaagttctcagaatggggaaataatgcctttttctactattttgaacaccgatcctccaaacttccgtggccagaatggatgggagtgatgcatggctatgaaattgaatttgtctttggtttacctctggaaagaagagataattacacaaaagccgaggaaattttgagtagatccatagtgaaacggtgggcaaattttgcaaaatatgggaatccaaatgagactcagaacaatagcacaagctggcctgtcttcaaaagcactgaacaaaaatatctaaccttgaatacagagtcaacaagaataatgacgaaactacgtgctcaacaatgtcgattctggacatcattttttccaaaagtcttggaaatgacaggaaatattgatgaagcagaatgggagtggaaagcaggattccatcgctggaacaattacatgatggactggaaaaatcaatttaacgattacactagcaagaaagaaagttgtgtgggtctc

SEQ ID NO: 30 - protein, 574 aa, Artificial Sequence
  synthetic butyrylcholinesterase variant
  VARIANT 227: Xaa = Ala
EDDIIIATKNGKVRGMNLTVFGGTVTAFLGIPYAQPPLGRLRFKKPQSLTKWSDIWNATKYANSCCQNIHQSFPGFHGSEMWNPNTDLSEDCLYLNVWIPAPKPKNATVLIWIYGGGFQTGTSSLHVYDGKFLARVERVIVVSMNYRVGALGFLALPGNPEAPGNMGLFDQQLALQWVQKNIAAFGGNPKSVTLFGESAGAASVSLHLLSPGSHSLFTRAILQSGSXNAPWAVTSLYEARNRTLNLAKLTGCSRENETEIIKCLRNKDPQEILLNEAFVVPYGTPLSVNFGPTVDGDFLTDMPDILLELGQFKKTQILVGVNKDEGTAFLVYGAPGFSKDNNSIITRKEFQEGLKIFFPGVSEFGKESILFHYTDWVDDQRPENYREALGDVVGDYNFICPALEFTKKFSEWGNNAFFYYFEHRSSKLPWPEWMGVMHGYEIEFVFGLPLERRDNYTKAEEILSRSIVKRWANFAKYGNPNETQNNSTSWPVFKSTEQKYLTLNTESTRIMTKLRAQQCRFWTSFFPKVLEMTGNIDEAEWEWKAGFHRWNNYMMDWKNQFNDYTSKKESCVGL

SEQ ID NO: 31 - DNA, 1722 bp, Artificial Sequence
  CDS (1)...(1722): synthetic butyrylcholinesterase variant
gaagatgacatcataattgcaacaaagaatggaaaagtcagagggatgaacttgacagtttttggtggcacggtaacagcctttcttggaattccctatgcacagccacctcttggtagacttcgattcaaaaagccacagtctctgaccaagtggtctgatatttggaatgccacaaaatatgcaaattcttgctgtcagaacatagatcaaagttttccaggcttcttcggatcagagatgtggaacccaaacactgacctcagtgaagactgtttatatctaaatgtatggattccagcacctaaaccaaaaaatgccactgtattgatatggatttatggtggtggttttcaaactggaacatcatctttacatgtttatgatggcaagtttctggctcgggttgaaagagttattgtagtgtcaatgaactatagggtgggtgccctaggattcttagctttgccaggaaatcctgaggctccagggaacatgggtttatttgatcaacagttggctcttcagtgggttcaaaaaaatatagcagcctttggtggaaatcctaaaagtgtaactctctttggagaaagtgcaggagcagcttcagttagcctgcatttgctttctcctggaagccattcattgttcaccagagccattctgcaaagtggttccgckaatgctccttgggcggtaacatctctttatgaagctaggaacagaacgttgaacttagctaaattgactggttgctctagagagaatgagactgaaataatcaagtgtcttagaaataaagatccccaagaaattcttctgaatgaagcatttgttgtcccctatgggactcctttgtcagtaaactttggtccgaccgtggatggtgattttctcactgacatgccagacatattacttgaacttggacaatttaaaaaaacccagattttggtgggtgttaataaagatgaagggacagcttttttagtctatggtgctcctggcttcagcaaagataacaatagtatcataactagaaaagaatttcaggaaggtttaaaaatattttttccaggagtgagtgagtttggaaaggaatccatcctttttcattacacagactgggtagatgatcagagacctgaaaactaccgtgaggccttgggtgatgttgttggggattataatttcatatgccctgccttggagttcaccaagaagttctcagaatggggaaataatgcctttttctactattttgaacaccgatcctccaaacttccgtggccagaatggatgggagtgatgcatggctatgaaattgaatttgtctttggtttacctctggaaagaagagataattacacaaaagccgaggaaattttgagtagatccatagtgaaacggtgggcaaattttgcaaaatatgggaatccaaatgagactcagaacaatagcacaagctggcctgtcttcaaaagcactgaacaaaaatatctaaccttgaatacagagtcaacaagaataatgacgaaactacgtgctcaacaatgtcgattctggacatcattttttccaaaagtcttggaaatgacaggaaatattgatgaagcagaatgggagtggaaagcaggattccatcgctggaacaattacatgatggactggaaaaatcaatttaacgattacactagcaagaaagaaagttgtgtgggtctc

SEQ ID NO: 32 - protein, 574 aa, Artificial Sequence
  synthetic butyrylcholinesterase variant
  VARIANT 227: Xaa = Ala
EDDIIIATKNGKVRGMNLTVFGGTVTAFLGIPYAQPPLGRLRFKKPQSLTKWSDIWNATKYANSCCQNIDQSFPGFFGSEMWNPNTDLSEDCLYLNVWIPAPKPKNATVLIWIYGGGFQTGTSSLHVYDGKFLARVERVIVVSMNYRVGALGFLALPGNPEAPGNMGLFDQQLALQWVQKNIAAFGGNPKSVTLFGESAGAASVSLHLLSPGSHSLFTRAILQSGSXNAPWAVTSLYEARNRTLNLAKLTGCSRENETEIIKCLRNKDPQEILLNEAFVVPYGTPLSVNFGPTVDGDFLTDMPDILLELGQFKKTQILVGVNKDEGTAFLVYGAPGFSKDNNSIITRKEFQEGLKIFFPGVSEFGKESILFHYTDWVDDQRPENYREALGDVVGDYNFICPALEFTKKFSEWGNNAFFYYFEHRSSKLPWPEWMGVMHGYEIEFVFGLPLERRDNYTKAEEILSRSIVKRWANFAKYGNPNETQNNSTSWPVFKSTEQKYLTLNTESTRIMTKLRAQQCRFWTSFFPKVLEMTGNIDEAEWEWKAGFHRWNNYMMDWKNQFNDYTSKKESCVGL

SEQ ID NO: 33 - DNA, 1722 bp, Artificial Sequence
  CDS (1)...(1722): synthetic butyrylcholinesterase variant
gaagatgacatcataattgcaacaaagaatggaaaagtcagagggatgaacttgacagtttttggtggcacggtaacagcctttcttggaattccctatgcacagccacctcttggtagacttcgattcaaaaagccacagtctctgaccaagtggtctgatatttggaatgccacaaaatatgcaaattcttgctgtcagaacatagatcaaagttttccaggcttccctggatcagagatgtggaacccaaacactgacctcagtgaagactgtttatatctaaatgtatggattccagcacctaaaccaaaaaatgccactgtattgatatggatttatggtggtggttttcaaactggaacatcatctttacatgtttatgatggcaagtttctggctcgggttgaaagagttattgtagtgtcaatgaactatagggtgggtgccctaggattcttagctttgccaggaaatcctgaggctccagggaacatgggtttatttgatcaacagttggctcttcagtgggttcaaaaaaatatagcagcctttggtggaaatcctaaaagtgtaactctctttggagaaagtgcaggagcagcttcagttagcctgcatttgctttctcctggaagccattcattgttcaccagagccattctgcaaagtggttccgckaatgctccttgggcggtaacatctctttatgaagctaggaacagaacgttgaacttagctaaattgactggttgctctagagagaatgagactgaaataatcaagtgtcttagaaataaagatccccaagaaattcttctgaatgaagcatttgttgtcccctatgggactcctttgtcagtaaactttggtccgaccgtggatggtgattttctcactgacatgccagacatattacttgaacttggacaatttaaaaaaacccagattttggtgggtgttaataaagatgaagggacagcttttttagtctatggtgctcctggcttcagcaaagataacaatagtatcataactagaaaagaatttcaggaaggtttaaaaatattttttccaggagtgagtgagtttggaaaggaatccatcctttttcattacacagactgggtagatgatcagagacctgaaaactaccgtgaggccttgggtgatgttgttggggattataatttcatatgccctgccttggagttcaccaagaagttctcagaatggggaaataatgcctttttctactattttgaacaccgatcctccaaacttccgtggccagaatggatgggagtgatgcatggctatgaaattgaatttgtctttggtttacctctggaaagaagagataattacacaaaagccgaggaaattttgagtagatccatagtgaaacggtgggcaaattttgcaaaatatgggaatccaaatgagactcagaacaatagcacaagctggcctgtcttcaaaagcactgaacaaaaatatctaaccttgaatacagagtcaacaagaataatgacgaaactacgtgctcaacaatgtcgattctggacatcattttttccaaaagtcttggaaatgacaggaaatattgatgaagcagaatgggagtggaaagcaggattccatcgctggaacaattacatgatggactggaaaaatcaatttaacgattacactagcaagaaagaaagttgtgtgggtctc

SEQ ID NO: 34 - protein, 574 aa, Artificial Sequence
  synthetic butyrylcholinesterase variant
  VARIANT 227: Xaa = Ala
EDDIIIATKNGKVRGMNLTVFGGTVTAFLGIPYAQPPLGRLRFKKPQSLTKWSDIWNATKYANSCCQNIDQSFPGFPGSEMWNPNTDLSEDCLYLNVWIPAPKPKNATVLIWIYGGGFQTGTSSLHVYDGKFLARVERVIVVSMNYRVGALGFLALPGNPEAPGNMGLFDQQLALQWVQKNIAAFGGNPKSVTLFGESAGAASVSLHLLSPGSHSLFTRAILQSGSXNAPWAVTSLYEARNRTLNLAKLTGCSRENETEIIKCLRNKDPQEILLNEAFVVPYGTPLSVNFGPTVDGDFLTDMPDILLELGQFKKTQILVGVNKDEGTAFLVYGAPGFSKDNNSIITRKEFQEGLKIFFPGVSEFGKESILFHYTDWVDDQRPENYREALGDVVGDYNFICPALEFTKKFSEWGNNAFFYYFEHRSSKLPWPEWMGVMHGYEIEFVFGLPLERRDNYTKAEEILSRSIVKRWANFAKYGNPNETQNNSTSWPVFKSTEQKYLTLNTESTRIMTKLRAQQCRFWTSFFPKVLEMTGNIDEAEWEWKAGFHRWNNYMMDWKNQFNDYTSKKESCVGL

SEQ ID NO: 35 - DNA, 1722 bp, Artificial Sequence
  CDS (1)...(1722): synthetic butyrylcholinesterase variant
gaagatgacatcataattgcaacaaagaatggaaaagtcagagggatgaacttgacagtttttggtggcacggtaacagcctttcttggaattccctatgcacagccacctcttggtagacttcgattcaaaaagccacagtctctgaccaagtggtctgatatttggaatgccacaaaatatgcaaattcttgctgtcagaacatagatcaaagttttccaggcttccatggatcagagatgtggaacccaaacactgacctcagtgaagactgtttatatctaaatgtatggattccagcacctaaaccaaaaaatgccactgtattgatatggatttatggtggtggttttcaatggggaacatcatctttacatgtttatgatggcaagtttctggctcgggttgaaagagttattgtagtgtcaatgaactatagggtgggtgccctaggattcttagctttgccaggaaatcctgaggctccagggaacatgggtttatttgatcaacagttggctcttcagtgggttcaaaaaaatatagcagcctttggtggaaatcctaaaagtgtaactctctttggagaaagtgcaggagcagcttcagttagcctgcatttgctttctcctggaagccattcattgttcaccagagccattctgcaaagtggttccgckaatgctccttgggcggtaacatctctttatgaagctaggaacagaacgttgaacttagctaaattgactggttgctctagagagaatgagactgaaataatcaagtgtcttagaaataaagatccccaagaaattcttctgaatgaagcatttgttgtcccctatgggactcctttgtcagtaaactttggtccgaccgtggatggtgattttctcactgacatgccagacatattacttgaacttggacaatttaaaaaaacccagattttggtgggtgttaataaagatgaagggacagcttttttagtctatggtgctcctggcttcagcaaagataacaatagtatcataactagaaaagaatttcaggaaggtttaaaaatattttttccaggagtgagtgagtttggaaaggaatccatcctttttcattacacagactgggtagatgatcagagacctgaaaactaccgtgaggccttgggtgatgttgttggggattataatttcatatgccctgccttggagttcaccaagaagttctcagaatggggaaataatgcctttttctactattttgaacaccgatcctccaaacttccgtggccagaatggatgggagtgatgcatggctatgaaattgaatttgtctttggtttacctctggaaagaagagataattacacaaaagccgaggaaattttgagtagatccatagtgaaacggtgggcaaattttgcaaaatatgggaatccaaatgagactcagaacaatagcacaagctggcctgtcttcaaaagcactgaacaaaaatatctaaccttgaatacagagtcaacaagaataatgacgaaactacgtgctcaacaatgtcgattctggacatcattttttccaaaagtcttggaaatgacaggaaatattgatgaagcagaatgggagtggaaagcaggattccatcgctggaacaattacatgatggactggaaaaatcaatttaacgattacactagcaagaaagaaagttgtgtgggtctc

SEQ ID NO: 36 - protein, 574 aa, Artificial Sequence
  synthetic butyrylcholinesterase variant
  VARIANT 227: Xaa = Ala
EDDIIIATKNGKVRGMNLTVFGGTVTAFLGIPYAQPPLGRLRFKKPQSLTKWSDIWNATKYANSCCQNIDQSFPGFHGSEMWNPNTDLSEDCLYLNVWIPAPKPKNATVLIWIYGGGFQWGTSSLHVYDGKFLARVERVIVVSMNYRVGALGFLALPGNPEAPGNMGLFDQQLALQWVQKNIAAFGGNPKSVTLFGESAGAASVSLHLLSPGSHSLFTRAILQSGSXNAPWAVTSLYEARNRTLNLAKLTGCSRENETEIIKCLRNKDPQEILLNEAFVVPYGTPLSVNFGPTVDGDFLTDMPDILLELGQFKKTQILVGVNKDEGTAFLVYGAPGFSKDNNSIITRKEFQEGLKIFFPGVSEFGKESILFHYTDWVDDQRPENYREALGDVVGDYNFICPALEFTKKFSEWGNNAFFYYFEHRSSKLPWPEWMGVMHGYEIEFVFGLPLERRDNYTKAEEILSRSIVKRWANFAKYGNPNETQNNSTSWPVFKSTEQKYLTLNTESTRIMTKLRAQQCRFWTSFFPKVLEMTGNIDEAEWEWKAGFHRWNNYMMDWKNQFNDYTSKKESCVGL

SEQ ID NO: 37 - DNA, 1722 bp, Artificial Sequence
  CDS (1)...(1722): synthetic butyrylcholinesterase variant
gaagatgacatcataattgcaacaaagaatggaaaagtcagagggatgaacttgacagtttttggtggcacggtaacagcctttcttggaattccctatgcacagccacctcttggtagacttcgattcaaaaagccacagtctctgaccaagtggtctgatatttggaatgccacaaaatatgcaaattcttgctgtcagaacatagatcaaagttttccaggcttccatggatcagagatgtggaacccaaacactgacctcagtgaagactgtttatatctaaatgtatggattccagcacctaaaccaaaaaatgccactgtattgatatggatttatggtggtggttttcaatatggaacatcatctttacatgtttatgatggcaagtttctggctcgggttgaaagagttattgtagtgtcaatgaactatagggtgggtgccctaggattcttagctttgccaggaaatcctgaggctccagggaacatgggtttatttgatcaacagttggctcttcagtgggttcaaaaaaatatagcagcctttggtggaaatcctaaaagtgtaactctctttggagaaagtgcaggagcagcttcagttagcctgcatttgctttctcctggaagccattcattgttcaccagagccattctgcaaagtggttccgckaatgctccttgggcggtaacatctctttatgaagctaggaacagaacgttgaacttagctaaattgactggttgctctagagagaatgagactgaaataatcaagtgtcttagaaataaagatccccaagaaattcttctgaatgaagcatttgttgtcccctatgggactcctttgtcagtaaactttggtccgaccgtggatggtgattttctcactgacatgccagacatattacttgaacttggacaatttaaaaaaacccagattttggtgggtgttaataaagatgaagggacagcttttttagtctatggtgctcctggcttcagcaaagataacaatagtatcataactagaaaagaatttcaggaaggtttaaaaatattttttccaggagtgagtgagtttggaaaggaatccatcctttttcattacacagactgggtagatgatcagagacctgaaaactaccgtgaggccttgggtgatgttgttggggattataatttcatatgccctgccttggagttcaccaagaagttctcagaatggggaaataatgcctttttctactattttgaacaccgatcctccaaacttccgtggccagaatggatgggagtgatgcatggctatgaaattgaatttgtctttggtttacctctggaaagaagagataattacacaaaagccgaggaaattttgagtagatccatagtgaaacggtgggcaaattttgcaaaatatgggaatccaaatgagactcagaacaatagcacaagctggcctgtcttcaaaagcactgaacaaaaatatctaaccttgaatacagagtcaacaagaataatgacgaaactacgtgctcaacaatgtcgattctggacatcattttttccaaaagtcttggaaatgacaggaaatattgatgaagcagaatgggagtggaaagcaggattccatcgctggaacaattacatgatggactggaaaaatcaatttaacgattacactagcaagaaagaaagttgtgtgggtctc

SEQ ID NO: 38 - protein, 574 aa, Artificial Sequence
  synthetic butyrylcholinesterase variant
  VARIANT 227: Xaa = Ala
EDDIIIATKNGKVRGMNLTVFGGTVTAFLGIPYAQPPLGRLRFKKPQSLTKWSDIWNATKYANSCCQNIDQSFPGFHGSEMWNPNTDLSEDCLYLNVWIPAPKPKNATVLIWIYGGGFQYGTSSLHVYDGKFLARVERVIVVSMNYRVGALGFLALPGNPEAPGNMGLFDQQLALQWVQKNIAAFGGNPKSVTLFGESAGAASVSLHLLSPGSHSLFTRAILQSGSXNAPWAVTSLYEARNRTLNLAKLTGCSRENETEIIKCLRNKDPQEILLNEAFVVPYGTPLSVNFGPTVDGDFLTDMPDILLELGQFKKTQILVGVNKDEGTAFLVYGAPGFSKDNNSIITRKEFQEGLKIFFPGVSEFGKESILFHYTDWVDDQRPENYREALGDVVGDYNFICPALEFTKKFSEWGNNAFFYYFEHRSSKLPWPEWMGVMHGYEIEFVFGLPLERRDNYTKAEEILSRSIVKRWANFAKYGNPNETQNNSTSWPVFKSTEQKYLTLNTESTRIMTKLRAQQCRFWTSFFPKVLEMTGNIDEAEWEWKAGFHRWNNYMMDWKNQFNDYTSKKESCVGL

SEQ ID NO: 39 - DNA, 1722 bp, Artificial Sequence
  CDS (1)...(1722): synthetic butyrylcholinesterase variant
gaagatgacatcataattgcaacaaagaatggaaaagtcagagggatgaacttgacagtttttggtggcacggtaacagcctttcttggaattccctatgcacagccacctcttggtagacttcgattcaaaaagccacagtctctgaccaagtggtctgatatttggaatgccacaaaatatgcaaattcttgctgtcagaacatagatcaaagttttccaggcttccatggatcagagatgtggaacccaaacactgacctcagtgaagactgtttatatctaaatgtatggattccagcacctaaaccaaaaaatgccactgtattgatatggatttatggtggtggttttcaaactggaacatcatctttacatgtttatgatggcaagtttctggctcgggttgaaagagttattgtagtgtcaatgaactatagggtgggtgccctaggattcttagctttgccaggaaatcctgaggctccagggaacatgggtttatttgatcaacagttggctcttcagtgggttcaaaaaaatatagcagcctttggtggaaatcctaaaagtgtaactctctttggagaaagtgcaggagcagcttcagttagcctgcatttgctttctcctggaagccattcattgttcaccagagccattctgcaaagtggttccgckaatgctccttgggcggtaacatctctttatgaagctaggaacagaacgttgaacttagctaaattgactggttgctctagagagaatgagactgaaataatcaagtgtcttagaaataaagatccccaagaaattcttctgaatgaagcatttgttgtccccggtgggactcctttgtcagtaaactttggtccgaccgtggatggtgattttctcactgacatgccagacatattacttgaacttggacaatttaaaaaaacccagattttggtgggtgttaataaagatgaagggacagcttttttagtctatggtgctcctggcttcagcaaagataacaatagtatcataactagaaaagaatttcaggaaggtttaaaaatattttttccaggagtgagtgagtttggaaaggaatccatcctttttcattacacagactgggtagatgatcagagacctgaaaactaccgtgaggccttgggtgatgttgttggggattataatttcatatgccctgccttggagttcaccaagaagttctcagaatggggaaataatgcctttttctactattttgaacaccgatcctccaaacttccgtggccagaatggatgggagtgatgcatggctatgaaattgaatttgtctttggtttacctctggaaagaagagataattacacaaaagccgaggaaattttgagtagatccatagtgaaacggtgggcaaattttgcaaaatatgggaatccaaatgagactcagaacaatagcacaagctggcctgtcttcaaaagcactgaacaaaaatatctaaccttgaatacagagtcaacaagaataatgacgaaactacgtgctcaacaatgtcgattctggacatcattttttccaaaagtcttggaaatgacaggaaatattgatgaagcagaatgggagtggaaagcaggattccatcgctggaacaattacatgatggactggaaaaatcaatttaacgattacactagcaagaaagaaagttgtgtgggtctc

SEQ ID NO: 40 - protein, 574 aa, Artificial Sequence
  synthetic butyrylcholinesterase variant
  VARIANT 227: Xaa = Ala
EDDIIIATKNGKVRGMNLTVFGGTVTAFLGIPYAQPPLGRLRFKKPQSLTKWSDIWNATKYANSCCQNIDQSFPGFHGSEMWNPNTDLSEDCLYLNVWIPAPKPKNATVLIWIYGGGFQTGTSSLHVYDGKFLARVERVIVVSMNYRVGALGFLALPGNPEAPGNMGLFDQQLALQWVQKNIAAFGGNPKSVTLFGESAGAASVSLHLLSPGSHSLFTRAILQSGSXNAPWAVTSLYEARNRTLNLAKLTGCSRENETEIIKCLRNKDPQEILLNEAFVVPGGTPLSVNFGPTVDGDFLTDMPDILLELGQFKKTQILVGVNKDEGTAFLVYGAPGFSKDNNSIITRKEFQEGLKIFFPGVSEFGKESILFHYTDWVDDQRPENYREALGDVVGDYNFICPALEFTKKFSEWGNNAFFYYFEHRSSKLPWPEWMGVMHGYEIEFVFGLPLERRDNYTKAEEILSRSIVKRWANFAKYGNPNETQNNSTSWPVFKSTEQKYLTLNTESTRIMTKLRAQQCRFWTSFFPKVLEMTGNIDEAEWEWKAGFHRWNNYMMDWKNQFNDYTSKKESCVGL

SEQ ID NO: 41 - DNA, 1722 bp, Artificial Sequence
  CDS (1)...(1722): synthetic butyrylcholinesterase variant
gaagatgacatcataattgcaacaaagaatggaaaagtcagagggatgaacttgacagtttttggtggcacggtaacagcctttcttggaattccctatgcacagccacctcttggtagacttcgattcaaaaagccacagtctctgaccaagtggtctgatatttggaatgccacaaaatatgcaaattcttgctgtcagaacatagatcaaagttttccaggcttccatggatcagagatgtggaacccaaacactgacctcagtgaagactgtttatatctaaatgtatggattccagcacctaaaccaaaaaatgccactgtattgatatggatttatggtggtggttttcaaactggaacatcatctttacatgtttatgatggcaagtttctggctcgggttgaaagagttattgtagtgtcaatgaactatagggtgggtgccctaggattcttagctttgccaggaaatcctgaggctccagggaacatgggtttatttgatcaacagttggctcttcagtgggttcaaaaaaatatagcagcctttggtggaaatcctaaaagtgtaactctctttggagaaagtgcaggagcagcttcagttagcctgcatttgctttctcctggaagccattcattgttcaccagagccattctgcaaagtggttccgckaatgctccttgggcggtaacatctctttatgaagctaggaacagaacgttgaacttagctaaattgactggttgctctagagagaatgagactgaaataatcaagtgtcttagaaataaagatccccaagaaattcttctgaatgaagcatttgttgtccccaatgggactcctttgtcagtaaactttggtccgaccgtggatggtgattttctcactgacatgccagacatattacttgaacttggacaatttaaaaaaacccagattttggtgggtgttaataaagatgaagggacagcttttttagtctatggtgctcctggcttcagcaaagataacaatagtatcataactagaaaagaatttcaggaaggtttaaaaatattttttccaggagtgagtgagtttggaaaggaatccatcctttttcattacacagactgggtagatgatcagagacctgaaaactaccgtgaggccttgggtgatgttgttggggattataatttcatatgccctgccttggagttcaccaagaagttctcagaatggggaaataatgcctttttctactattttgaacaccgatcctccaaacttccgtggccagaatggatgggagtgatgcatggctatgaaattgaatttgtctttggtttacctctggaaagaagagataattacacaaaagccgaggaaattttgagtagatccatagtgaaacggtgggcaaattttgcaaaatatgggaatccaaatgagactcagaacaatagcacaagctggcctgtcttcaaaagcactgaacaaaaatatctaaccttgaatacagagtcaacaagaataatgacgaaactacgtgctcaacaatgtcgattctggacatcattttttccaaaagtcttggaaatgacaggaaatattgatgaagcagaatgggagtggaaagcaggattccatcgctggaacaattacatgatggactggaaaaatcaatttaacgattacactagcaagaaagaaagttgtgtgggtctc

SEQ ID NO: 42 - protein, 574 aa, Artificial Sequence
  synthetic butyrylcholinesterase variant
  VARIANT 227: Xaa = Ala
EDDIIIATKNGKVRGMNLTVFGGTVTAFLGIPYAQPPLGRLRFKKPQSLTKWSDIWNATKYANSCCQNIDQSFPGFHGSEMWNPNTDLSEDCLYLNVWIPAPKPKNATVLIWIYGGGFQTGTSSLHVYDGKFLARVERVIVVSMNYRVGALGFLALPGNPEAPGNMGLFDQQLALQWVQKNIAAFGGNPKSVTLFGESAGAASVSLHLLSPGSHSLFTRAILQSGSXNAPWAVTSLYEARNRTLNLAKLTGCSRENETEIIKCLRNKDPQEILLNEAFVVPNGTPLSVNFGPTVDGDFLTDMPDILLELGQFKKTQILVGVNKDEGTAFLVYGAPGFSKDNNSIITRKEFQEGLKIFFPGVSEFGKESILFHYTDWVDDQRPENYREALGDVVGDYNFICPALEFTKKFSEWGNNAFFYYFEHRSSKLPWPEWMGVMHGYEIEFVFGLPLERRDNYTKAEEILSRSIVKRWANFAKYGNPNETQNNSTSWPVFKSTEQKYLTLNTESTRIMTKLRAQQCRFWTSFFPKVLEMTGNIDEAEWEWKAGFHRWNNYMMDWKNQFNDYTSKKESCVGL

SEQ ID NO: 43 - DNA, 1722 bp, Artificial Sequence
  CDS (1)...(1722): synthetic butyrylcholinesterase variant
gaagatgacatcataattgcaacaaagaatggaaaagtcagagggatgaacttgacagtttttggtggcacggtaacagcctttcttggaattccctatgcacagccacctcttggtagacttcgattcaaaaagccacagtctctgaccaagtggtctgatatttggaatgccacaaaatatgcaaattcttgctgtcagaacatagatcaaagttttccaggcttccatggatcagagatgtggaacccaaacactgacctcagtgaagactgtttatatctaaatgtatggattccagcacctaaaccaaaaaatgccactgtattgatatggatttatggtggtggttttcaaactggaacatcatctttacatgtttatgatggcaagtttctggctcgggttgaaagagttattgtagtgtcaatgaactatagggtgggtgccctaggattcttagctttgccaggaaatcctgaggctccagggaacatgggtttatttgatcaacagttggctcttcagtgggttcaaaaaaatatagcagcctttggtggaaatcctaaaagtgtaactctctttggagaaagtgcaggagcagcttcagttagcctgcatttgctttctcctggaagccattcattgttcaccagagccattctgcaaagtggttccgckaatgctccttgggcggtaacatctctttatgaagctaggaacagaacgttgaacttagctaaattgactggttgctctagagagaatgagactgaaataatcaagtgtcttagaaataaagatccccaagaaattcttctgaatgaagcatttgttgtcccctatgggaaccctttgtcagtaaactttggtccgaccgtggatggtgattttctcactgacatgccagacatattacttgaacttggacaatttaaaaaaacccagattttggtgggtgttaataaagatgaagggacagcttttttagtctatggtgctcctggcttcagcaaagataacaatagtatcataactagaaaagaatttcaggaaggtttaaaaatattttttccaggagtgagtgagtttggaaaggaatccatcctttttcattacacagactgggtagatgatcagagacctgaaaactaccgtgaggccttgggtgatgttgttggggattataatttcatatgccctgccttggagttcaccaagaagttctcagaatggggaaataatgcctttttctactattttgaacaccgatcctccaaacttccgtggccagaatggatgggagtgatgcatggctatgaaattgaatttgtctttggtttacctctggaaagaagagataattacacaaaagccgaggaaattttgagtagatccatagtgaaacggtgggcaaattttgcaaaatatgggaatccaaatgagactcagaacaatagcacaagctggcctgtcttcaaaagcactgaacaaaaatatctaaccttgaatacagagtcaacaagaataatgacgaaactacgtgctcaacaatgtcgattctggacatcattttttccaaaagtcttggaaatgacaggaaatattgatgaagcagaatgggagtggaaagcaggattccatcgctggaacaattacatgatggactggaaaaatcaatttaacgattacactagcaagaaagaaagttgtgtgggtctc

SEQ ID NO: 44 - protein, 574 aa, Artificial Sequence
  synthetic butyrylcholinesterase variant
  VARIANT 227: Xaa = Ala
EDDIIIATKNGKVRGMNLTVFGGTVTAFLGIPYAQPPLGRLRFKKPQSLTKWSDIWNATKYANSCCQNIDQSFPGFHGSEMWNPNTDLSEDCLYLNVWIPAPKPKNATVLIWIYGGGFQTGTSSLHVYDGKFLARVERVIVVSMNYRVGALGFLALPGNPEAPGNMGLFDQQLALQWVQKNIAAFGGNPKSVTLFGESAGAASVSLHLLSPGSHSLFTRAILQSGSXNAPWAVTSLYEARNRTLNLAKLTGCSRENETEIIKCLRNKDPQEILLNEAFVVPYGNPLSVNFGPTVDGDFLTDMPDILLELGQFKKTQILVGVNKDEGTAFLVYGAPGFSKDNNSIITRKEFQEGLKIFFPGVSEFGKESILFHYTDWVDDQRPENYREALGDVVGDYNFICPALEFTKKFSEWGNNAFFYYFEHRSSKLPWPEWMGVMHGYEIEFVFGLPLERRDNYTKAEEILSRSIVKRWANFAKYGNPNETQNNSTSWPVFKSTEQKYLTLNTESTRIMTKLRAQQCRFWTSFFPKVLEMTGNIDEAEWEWKAGFHRWNNYMMDWKNQFNDYTSKKESCVGL

SEQ ID NO: 45 - DNA, 1722 bp, Artificial Sequence
  CDS (1)...(1722): synthetic butyrylcholinesterase variant
gaagatgacatcataattgcaacaaagaatggaaaagtcagagggatgaacttgacagtttttggtggcacggtaacagcctttcttggaattccctatgcacagccacctcttggtagacttcgattcaaaaagccacagtctctgaccaagtggtctgatatttggaatgccacaaaatatgcaaattcttgctgtcagaacatagatcaaagttttccaggcttccatggatcagagatgtggaacccaaacactgacctcagtgaagactgtttatatctaaatgtatggattccagcacctaaaccaaaaaatgccactgtattgatatggatttatggtggtggttttcaaactggaacatcatctttacatgtttatgatggcaagtttctggctcgggttgaaagagttattgtagtgtcaatgaactatagggtgggtgccctaggattcttagctttgccaggaaatcctgaggctccagggaacatgggtttatttgatcaacagttggctcttcagtgggttcaaaaaaatatagcagcctttggtggaaatcctaaaagtgtaactctctttggagaaagtgcaggagcagcttcagttagcctgcatttgctttctcctggaagccattcattgttcaccagagccattctgcaaagtggttccgckaatgctccttgggcggtaacatctctttatgaagctaggaacagaacgttgaacttagctaaattgactggttgctctagagagaatgagactgaaataatcaagtgtcttagaaataaagatccccaagaaattcttctgaatgaagcatttgttgtcccctatgggactcctttgtcagtaaactttggtccgaccgtggatggtgattttctccctgacatgccagacatattacttgaacttggacaatttaaaaaaacccagattttggtgggtgttaataaagatgaagggacagcttttttagtctatggtgctcctggcttcagcaaagataacaatagtatcataactagaaaagaatttcaggaaggtttaaaaatattttttccaggagtgagtgagtttggaaaggaatccatcctttttcattacacagactgggtagatgatcagagacctgaaaactaccgtgaggccttgggtgatgttgttggggattataatttcatatgccctgccttggagttcaccaagaagttctcagaatggggaaataatgcctttttctactattttgaacaccgatcctccaaacttccgtggccagaatggatgggagtgatgcatggctatgaaattgaatttgtctttggtttacctctggaaagaagagataattacacaaaagccgaggaaattttgagtagatccatagtgaaacggtgggcaaattttgcaaaatatgggaatccaaatgagactcagaacaatagcacaagctggcctgtcttcaaaagcactgaacaaaaatatctaaccttgaatacagagtcaacaagaataatgacgaaactacgtgctcaacaatgtcgattctggacatcattttttccaaaagtcttggaaatgacaggaaatattgatgaagcagaatgggagtggaaagcaggattccatcgctggaacaattacatgatggactggaaaaatcaatttaacgattacactagcaagaaagaaagttgtgtgggtctc

SEQ ID NO: 46 - protein, 574 aa, Artificial Sequence
  synthetic butyrylcholinesterase variant
  VARIANT 227: Xaa = Ala
EDDIIIATKNGKVRGMNLTVFGGTVTAFLGIPYAQPPLGRLRFKKPQSLTKWSDIWNATKYANSCCQNIDQSFPGFHGSEMWNPNTDLSEDCLYLNVWIPAPKPKNATVLIWIYGGGFQTGTSSLHVYDGKFLARVERVIVVSMNYRVGALGFLALPGNPEAPGNMGLFDQQLALQWVQKNIAAFGGNPKSVTLFGESAGAASVSLHLLSPGSHSLFTRAILQSGSXNAPWAVTSLYEARNRTLNLAKLTGCSRENETEIIKCLRNKDPQEILLNEAFVVPYGTPLSVNFGPTVDGDFLPDMPDILLELGQFKKTQILVGVNKDEGTAFLVYGAPGFSKDNNSIITRKEFQEGLKIFFPGVSEFGKESILFHYTDWVDDQRPENYREALGDVVGDYNFICPALEFTKKFSEWGNNAFFYYFEHRSSKLPWPEWMGVMHGYEIEFVFGLPLERRDNYTKAEEILSRSIVKRWANFAKYGNPNETQNNSTSWPVFKSTEQKYLTLNTESTRIMTKLRAQQCRFWTSFFPKVLEMTGNIDEAEWEWKAGFHRWNNYMMDWKNQFNDYTSKKESCVGL

SEQ ID NO: 47 - DNA, 1722 bp, Artificial Sequence
  CDS (1)...(1722): synthetic butyrylcholinesterase variant
gaagatgacatcataattgcaacaaagaatggaaaagtcagagggatgaacttgacagtttttggtggcacggtaacagcctttcttggaattccctatgcacagccacctcttggtagacttcgattcaaaaagccacagtctctgaccaagtggtctgatatttggaatgccacaaaatatgcaaattcttgctgtcagaacatagatcaaagttttccaggcttccatggatcagagatgtggaacccaaacactgacctcagtgaagactgtttatatctaaatgtatggattccagcacctaaaccaaaaaatgccactgtattgatatggatttatggtggtggttttcaaactggaacatcatctttacatgtttatgatggcaagtttctggctcgggttgaaagagttattgtagtgtcaatgaactatagggtgggtgccctaggattcttagctttgccaggaaatcctgaggctccagggaacatgggtttatttgatcaacagttggctcttcagtgggttcaaaaaaatatagcagcctttggtggaaatcctaaaagtgtaactctctttggagaaagtgcaggagcagcttcagttagcctgcatttgctttctcctggaagccattcattgttcaccagagccattctgcaaagtggttccgckaatgctccttgggcggtaacatctctttatgaagctaggaacagaacgttgaacttagctaaattgactggttgctctagagagaatgagactgaaataatcaagtgtcttagaaataaagatccccaagaaattcttctgaatgaagcatttgttgtcccctatgggcgtcctttgtcagtaaactttggtccgaccgtggatggtgattttctcactgacatgccagacatattacttgaacttggacaatttaaaaaaacccagattttggtgggtgttaataaagatgaagggacagcttttttagtctatggtgctcctggcttcagcaaagataacaatagtatcataactagaaaagaatttcaggaaggtttaaaaatattttttccaggagtgagtgagtttggaaaggaatccatcctttttcattacacagactgggtagatgatcagagacctgaaaactaccgtgaggccttgggtgatgttgttggggattataatttcatatgccctgccttggagttcaccaagaagttctcagaatggggaaataatgcctttttctactattttgaacaccgatcctccaaacttccgtggccagaatggatgggagtgatgcatggctatgaaattgaatttgtctttggtttacctctggaaagaagagataattacacaaaagccgaggaaattttgagtagatccatagtgaaacggtgggcaaattttgcaaaatatgggaatccaaatgagactcagaacaatagcacaagctggcctgtcttcaaaagcactgaacaaaaatatctaaccttgaatacagagtcaacaagaataatgacgaaactacgtgctcaacaatgtcgattctggacatcattttttccaaaagtcttggaaatgacaggaaatattgatgaagcagaatgggagtggaaagcaggattccatcgctggaacaattacatgatggactggaaaaatcaatttaacgattacactagcaagaaagaaagttgtgtgggtctc

SEQ ID NO: 48 - protein, 574 aa, Artificial Sequence
  synthetic butyrylcholinesterase variant
  VARIANT 227: Xaa = Ala
EDDIIIATKNGKVRGMNLTVFGGTVTAFLGIPYAQPPLGRLRFKKPQSLTKWSDIWNATKYANSCCQNIDQSFPGFHGSEMWNPNTDLSEDCLYLNVWIPAPKPKNATVLIWIYGGGFQTGTSSLHVYDGKFLARVERVIVVSMNYRVGALGFLALPGNPEAPGNMGLFDQQLALQWVQKNIAAFGGNPKSVTLFGESAGAASVSLHLLSPGSHSLFTRAILQSGSXNAPWAVTSLYEARNRTLNLAKLTGCSRENETEIIKCLRNKDPQEILLNEAFVVPYGRPLSVNFGPTVDGDFLTDMPDILLELGQFKKTQILVGVNKDEGTAFLVYGAPGFSKDNNSIITRKEFQEGLKIFFPGVSEFGKESILFHYTDWVDDQRPENYREALGDVVGDYNFICPALEFTKKFSEWGNNAFFYYFEHRSSKLPWPEWMGVMHGYEIEFVFGLPLERRDNYTKAEEILSRSIVKRWANFAKYGNPNETQNNSTSWPVFKSTEQKYLTLNTESTRIMTKLRAQQCRFWTSFFPKVLEMTGNIDEAEWEWKAGFHRWNNYMMDWKNQFNDYTSKKESCVGL

SEQ ID NO: 49 - DNA, 1722 bp, Artificial Sequence
  CDS (1)...(1722): synthetic butyrylcholinesterase variant
gaagatgacatcataattgcaacaaagaatggaaaagtcagagggatgaacttgacagtttttggtggcacggtaacagcctttcttggaattccctatgcacagccacctcttggtagacttcgattcaaaaagccacagtctctgaccaagtggtctgatatttggaatgccacaaaatatgcaaattcttgctgtcagaacatagatcaaagttttccaggcttccatggatcagagatgtggaacccaaacactgacctcagtgaagactgtttatatctaaatgtatggattccagcacctaaaccaaaaaatgccactgtattgatatggatttatggtggtggttttcaaactggaacatcatctttacatgtttatgatggcaagtttctggctcgggttgaaagagttattgtagtgtcaatgaactatagggtgggtgccctaggattcttagctttgccaggaaatcctgaggctccagggaacatgggtttatttgatcaacagttggctcttcagtgggttcaaaaaaatatagcagcctttggtggaaatcctaaaagtgtaactctctttggagaaagtgcaggagcagcttcagttagcctgcatttgctttctcctggaagccattcattgttcaccagagccattctgcaaagtggttccgckaatgctccttgggcggtaacatctctttatgaagctaggaacagaacgttgaacttagctaaattgactggttgctctagagagaatgagactgaaataatcaagtgtcttagaaataaagatccccaagaaattcttctgaatgaagcatttgttgtcccctatgggtctcctttgtcagtaaactttggtccgaccgtggatggtgattttctctctgacatgccagacatattacttgaacttggacaatttaaaaaaacccagattttggtgggtgttaataaagatgaagggacagcttttttagtctatggtgctcctggcttcagcaaagataacaatagtatcataactagaaaagaatttcaggaaggtttaaaaatattttttccaggagtgagtgagtttggaaaggaatccatcctttttcattacacagactgggtagatgatcagagacctgaaaactaccgtgaggccttgggtgatgttgttggggattataatttcatatgccctgccttggagttcaccaagaagttctcagaatggggaaataatgcctttttctactattttgaacaccgatcctccaaacttccgtggccagaatggatgggagtgatgcatggctatgaaattgaatttgtctttggtttacctctggaaagaagagataattacacaaaagccgaggaaattttgagtagatccatagtgaaacggtgggcaaattttgcaaaatatgggaatccaaatgagactcagaacaatagcacaagctggcctgtcttcaaaagcactgaacaaaaatatctaaccttgaatacagagtcaacaagaataatgacgaaactacgtgctcaacaatgtcgattctggacatcattttttccaaaagtcttggaaatgacaggaaatattgatgaagcagaatgggagtggaaagcaggattccatcgctggaacaattacatgatggactggaaaaatcaatttaacgattacactagcaagaaagaaagttgtgtgggtctc

SEQ ID NO: 50 - protein, 574 aa, Artificial Sequence
  synthetic butyrylcholinesterase variant
  VARIANT 227: Xaa = Ala
EDDIIIATKNGKVRGMNLTVFGGTVTAFLGIPYAQPPLGRLRFKKPQSLTKWSDIWNATKYANSCCQNIDQSFPGFHGSEMWNPNTDLSEDCLYLNVWIPAPKPKNATVLIWIYGGGFQTGTSSLHVYDGKFLARVERVIVVSMNYRVGALGFLALPGNPEAPGNMGLFDQQLALQWVQKNIAAFGGNPKSVTLFGESAGAASVSLHLLSPGSHSLFTRAILQSGSXNAPWAVTSLYEARNRTLNLAKLTGCSRENETEIIKCLRNKDPQEILLNEAFVVPYGSPLSVNFGPTVDGDFLSDMPDILLELGQFKKTQILVGVNKDEGTAFLVYGAPGFSKDNNSIITRKEFQEGLKIFFPGVSEFGKESILFHYTDWVDDQRPENYREALGDVVGDYNFICPALEFTKKFSEWGNNAFFYYFEHRSSKLPWPEWMGVMHGYEIEFVFGLPLERRDNYTKAEEILSRSIVKRWANFAKYGNPNETQNNSTSWPVFKSTEQKYLTLNTESTRIMTKLRAQQCRFWTSFFPKVLEMTGNIDEAEWEWKAGFHRWNNYMMDWKNQFNDYTSKKESCVGL

SEQ ID NO: 51 - DNA, 1722 bp, Artificial Sequence
  CDS (1)...(1722): synthetic butyrylcholinesterase variant
gaagatgacatcataattgcaacaaagaatggaaaagtcagagggatgaacttgacagtttttggtggcacggtaacagcctttcttggaattccctatgcacagccacctcttggtagacttcgattcaaaaagccacagtctctgaccaagtggtctgatatttggaatgccacaaaatatgcaaattcttgctgtcagaacatagatcaaagttttccaggcttccatggatcagagatgtggaacccaaacactgacctcagtgaagactgtttatatctaaatgtatggattccagcacctaaaccaaaaaatgccactgtattgatatggatttatggtggtggttttcaaactggaacatcatctttacatgtttatgatggcaagtttctggctcgggttgaaagagttattgtagtgtcaatgaactatagggtgggtgccctaggattcttagctttgccaggaaatcctgaggctccagggaacatgggtttatttgatcaacagttggctcttcagtgggttcaaaaaaatatagcagcctttggtggaaatcctaaaagtgtaactctctttggagaaagtgcaggagcagcttcagttagcctgcatttgctttctcctggaagccattcattgttcaccagagccattctgcaaagtggttccgckaatgctccttgggcggtaacatctctttatgaagctaggaacagaacgttgaacttagctaaattgactggttgctctagagagaatgagactgaaataatcaagtgtcttagaaataaagatccccaagaaattcttctgaatgaagcatttgttgtcccctatgggtatcctttgtcagtaaactttggtccgaccgtggatggtgattttctcactgacatgccagacatattacttgaacttggacaatttaaaaaaacccagattttggtgggtgttaataaagatgaagggacagcttttttagtctatggtgctcctggcttcagcaaagataacaatagtatcataactagaaaagaatttcaggaaggtttaaaaatattttttccaggagtgagtgagtttggaaaggaatccatcctttttcattacacagactgggtagatgatcagagacctgaaaactaccgtgaggccttgggtgatgttgttggggattataatttcatatgccctgccttggagttcaccaagaagttctcagaatggggaaataatgcctttttctactattttgaacaccgatcctccaaacttccgtggccagaatggatgggagtgatgcatggctatgaaattgaatttgtctttggtttacctctggaaagaagagataattacacaaaagccgaggaaattttgagtagatccatagtgaaacggtgggcaaattttgcaaaatatgggaatccaaatgagactcagaacaatagcacaagctggcctgtcttcaaaagcactgaacaaaaatatctaaccttgaatacagagtcaacaagaataatgacgaaactacgtgctcaacaatgtcgattctggacatcattttttccaaaagtcttggaaatgacaggaaatattgatgaagcagaatgggagtggaaagcaggattccatcgctggaacaattacatgatggactggaaaaatcaatttaacgattacactagcaagaaagaaagttgtgtgggtctc

SEQ ID NO: 52 - protein, 573 aa, Artificial Sequence
  synthetic butyrylcholinesterase variant
  VARIANT (1)...(573): Xaa = Ala
DDIIIATKNGKVRGMNLTVFGGTVTAFLGIPYAQPPLGRLRFKKPQSLTKWSDIWNATKYANSCCQNIDQSFPGFHGSEMWNPNTDLSEDCLYLNVWIPAPKPKNATVLIWIYGGGFQTGTSSLHVYDGKFLARVERVIVVSMNYRVGALGFLALPGNPEAPGNMGLFDQQLALQWVQKNIAAFGGNPKSVTLFGESAGAASVSLHLLSPGSHSLFTRAILQSGSXNAPWAVTSLYEARNRTLNLAKLTGCSRENETEIIKCLRNKDPQEILLNEAFVVPYGYPLSVNFGPTVDGDFLTDMPDILLELGQFKKTQILVGVNKDEGTAFLVYGAPGFSKDNNSIITRKEFQEGLKIFFPGVSEFGKESILFHYTDWVDDQRPENYREALGDVVGDYNFICPALEFTKKFSEWGNNAFFYYFEHRSSKLPWPEWMGVMHGYEIEFVFGLPLERRDNYTKAEEILSRSIVKRWANFAKYGNPNETQNNSTSWPVFKSTEQKYLTLNTESTRIMTKLRAQQCRFWTSFFPKVLEMTGNIDEAEWEWKAGFHRWNNYMMDWKNQFNDYTSKKESCVGL

SEQ ID NO: 53 - DNA, 1722 bp, Artificial Sequence
  CDS (1)...(1722): synthetic butyrylcholinesterase variant
gaagatgacatcataattgcaacaaagaatggaaaagtcagagggatgaacttgacagtttttggtggcacggtaacagcctttcttggaattccctatgcacagccacctcttggtagacttcgattcaaaaagccacagtctctgaccaagtggtctgatatttggaatgccacaaaatatgcaaattcttgctgtcagaacatagatcaaagttttccaggcttccatggatcagagatgtggaacccaaacactgacctcagtgaagactgtttatatctaaatgtatggattccagcacctaaaccaaaaaatgccactgtattgatatggatttatggtggtggttttcaaactggaacatcatctttacatgtttatgatggcaagtttctggctcgggttgaaagagttattgtagtgtcaatgaactatagggtgggtgccctaggattcttagctttgccaggaaatcctgaggctccagggaacatgggtttatttgatcaacagttggctcttcagtgggttcaaaaaaatatagcagcctttggtggaaatcctaaaagtgtaactctctttggagaaagtgcaggagcagcttcagttagcctgcatttgctttctcctggaagccattcattgttcaccagagccattctgcaaagtggttccgckaatgctccttgggcggtaacatctctttatgaagctaggaacagaacgttgaacttagctaaattgactggttgctctagagagaatgagactgaaataatcaagtgtcttagaaataaagatccccaagaaattcttctgaatgaagcatttgttgtcccctatgggactaatttgtcagtaaactttggtccgaccgtggatggtgattttctcactgacatgccagacatattacttgaacttggacaatttaaaaaaacccagattttggtgggtgttaataaagatgaagggacagcttttttagtctatggtgctcctggcttcagcaaagataacaatagtatcataactagaaaagaatttcaggaaggtttaaaaatattttttccaggagtgagtgagtttggaaaggaatccatcctttttcattacacagactgggtagatgatcagagacctgaaaactaccgtgaggccttgggtgatgttgttggggattataatttcatatgccctgccttggagttcaccaagaagttctcagaatggggaaataatgcctttttctactattttgaacaccgatcctccaaacttccgtggccagaatggatgggagtgatgcatggctatgaaattgaatttgtctttggtttacctctggaaagaagagataattacacaaaagccgaggaaattttgagtagatccatagtgaaacggtgggcaaattttgcaaaatatgggaatccaaatgagactcagaacaatagcacaagctggcctgtcttcaaaagcactgaacaaaaatatctaaccttgaatacagagtcaacaagaataatgacgaaactacgtgctcaacaatgtcgattctggacatcattttttccaaaagtcttggaaatgacaggaaatattgatgaagcagaatgggagtggaaagcaggattccatcgctggaacaattacatgatggactggaaaaatcaatttaacgattacactagcaagaaagaaagttgtgtgggtctc

SEQ ID NO: 54 - protein, 574 aa, Artificial Sequence
  synthetic butyrylcholinesterase variant
  VARIANT 227: Xaa = Ala
EDDIIIATKNGKVRGMNLTVFGGTVTAFLGIPYAQPPLGRLRFKKPQSLTKWSDIWNATKYANSCCQNIDQSFPGFHGSEMWNPNTDLSEDCLYLNVWIPAPKPKNATVLIWIYGGGFQTGTSSLHVYDGKFLARVERVIVVSMNYRVGALGFLALPGNPEAPGNMGLFDQQLALQWVQKNIAAFGGNPKSVTLFGESAGAASVSLHLLSPGSHSLFTRAILQSGSXNAPWAVTSLYEARNRTLNLAKLTGCSRENETEIIKCLRNKDPQEILLNEAFVVPYGTNLSVNFGPTVDGDFLTDMPDILLELGQFKKTQILVGVNKDEGTAFLVYGAPGFSKDNNSIITRKEFQEGLKIFFPGVSEFGKESILFHYTDWVDDQRPENYREALGDVVGDYNFICPALEFTKKFSEWGNNAFFYYFEHRSSKLPWPEWMGVMHGYEIEFVFGLPLERRDNYTKAEEILSRSIVKRWANFAKYGNPNETQNNSTSWPVFKSTEQKYLTLNTESTRIMTKLRAQQCRFWTSFFPKVLEMTGNIDEAEWEWKAGFHRWNNYMMDWKNQFNDYTSKKESCVGL

SEQ ID NO: 55 - DNA, 1722 bp, Artificial Sequence
  CDS (1)...(1722): synthetic butyrylcholinesterase variant
gaagatgacatcataattgcaacaaagaatggaaaagtcagagggatgaacttgacagtttttggtggcacggtaacagcctttcttggaattccctatgcacagccacctcttggtagacttcgattcaaaaagccacagtctctgaccaagtggtctgatatttggaatgccacaaaatatgcaaattcttgctgtcagaacatagatcaaagttttccaggcttccatggatcagagatgtggaacccaaacactgacctcagtgaagactgtttatatctaaatgtatggattccagcacctaaaccaaaaaatgccactgtattgatatggatttatggtggtggttttcaaactggaacatcatctttacatgtttatgatggcaagtttctggctcgggttgaaagagttattgtagtgtcaatgaactatagggtgggtgccctaggattcttagctttgccaggaaatcctgaggctccagggaacatgggtttatttgatcaacagttggctcttcagtgggttcaaaaaaatatagcagcctttggtggaaatcctaaaagtgtaactctctttggagaaagtgcaggagcagcttcagttagcctgcatttgctttctcctggaagccattcattgttcaccagagccattctgcaaagtggttccgckaatgctccttgggcggtaacatctctttatgaagctaggaacagaacgttgaacttagctaaattgactggttgctctagagagaatgagactgaaataatcaagtgtcttagaaataaagatccccaagaaattcttctgaatgaagcatttgttgtcccctatgggactcagttgtcagtaaactttggtccgaccgtggatggtgattttctcactgacatgccagacatattacttgaacttggacaatttaaaaaaacccagattttggtgggtgttaataaagatgaagggacagcttttttagtctatggtgctcctggcttcagcaaagataacaatagtatcataactagaaaagaatttcaggaaggtttaaaaatattttttccaggagtgagtgagtttggaaaggaatccatcctttttcattacacagactgggtagatgatcagagacctgaaaactaccgtgaggccttgggtgatgttgttggggattataatttcatatgccctgccttggagttcaccaagaagttctcagaatggggaaataatgcctttttctactattttgaacaccgatcctccaaacttccgtggccagaatggatgggagtgatgcatggctatgaaattgaatttgtctttggtttacctctggaaagaagagataattacacaaaagccgaggaaattttgagtagatccatagtgaaacggtgggcaaattttgcaaaatatgggaatccaaatgagactcagaacaatagcacaagctggcctgtcttcaaaagcactgaacaaaaatatctaaccttgaatacagagtcaacaagaataatgacgaaactacgtgctcaacaatgtcgattctggacatcattttttccaaaagtcttggaaatgacaggaaatattgatgaagcagaatgggagtggaaagcaggattccatcgctggaacaattacatgatggactggaaaaatcaatttaacgattacactagcaagaaagaaagttgtgtgggtctc

SEQ ID NO: 56 - protein, 574 aa, Artificial Sequence
  synthetic butyrylcholinesterase variant
  VARIANT 227: Xaa = Ala
EDDIIIATKNGKVRGMNLTVFGGTVTAFLGIPYAQPPLGRLRFKKPQSLTKWSDIWNATKYANSCCQNIDQSFPGFHGSEMWNPNTDLSEDCLYLNVWIPAPKPKNATVLIWIYGGGFQTGTSSLHVYDGKFLARVERVIVVSMNYRVGALGFLALPGNPEAPGNMGLFDQQLALQWVQKNIAAFGGNPKSVTLFGESAGAASVSLHLLSPGSHSLFTRAILQSGSXNAPWAVTSLYEARNRTLNLAKLTGCSRENETEIIKCLRNKDPQEILLNEAFVVPYGTQLSVNFGPTVDGDFLTDMPDILLELGQFKKTQILVGVNKDEGTAFLVYGAPGFSKDNNSIITRKEFQEGLKIFFPGVSEFGKESILFHYTDWVDDQRPENYREALGDVVGDYNFICPALEFTKKFSEWGNNAFFYYFEHRSSKLPWPEWMGVMHGYEIEFVFGLPLERRDNYTKAEEILSRSIVKRWANFAKYGNPNETQNNSTSWPVFKSTEQKYLTLNTESTRIMTKLRAQQCRFWTSFFPKVLEMTGNIDEAEWEWKAGFHRWNNYMMDWKNQFNDYTSKKESCVGL

SEQ ID NO: 57 - DNA, 1722 bp, Artificial Sequence
  CDS (1)...(1722): synthetic butyrylcholinesterase variant
gaagatgacatcataattgcaacaaagaatggaaaagtcagagggatgaacttgacagtttttggtggcacggtaacagcctttcttggaattccctatgcacagccacctcttggtagacttcgattcaaaaagccacagtctctgaccaagtggtctgatatttggaatgccacaaaatatgcaaattcttgctgtcagaacatagatcaaagttttccaggcttccatggatcagagatgtggaacccaaacactgacctcagtgaagactgtttatatctaaatgtatggattccagcacctaaaccaaaaaatgccactgtattgatatggatttatggtggtggttttcaaactggaacatcatctttacatgtttatgatggcaagtttctggctcgggttgaaagagttattgtagtgtcaatgaactatagggtgggtgccctaggattcttagctttgccaggaaatcctgaggctccagggaacatgggtttatttgatcaacagttggctcttcagtgggttcaaaaaaatatagcagcctttggtggaaatcctaaaagtgtaactctctttggagaaagtgcaggagcagcttcagttagcctgcatttgctttctcctggaagccattcattgttcaccagagccattctgcaaagtggttccgckaatgctccttgggcggtaacatctctttatgaagctaggaacagaacgttgaacttagctaaattgactggttgctctagagagaatgagactgaaataatcaagtgtcttagaaataaagatccccaagaaattcttctgaatgaagcatttgttgtcccctatgggactcctgcgtcagtaaactttggtccgaccgtggatggtgattttctcactgacatgccagacatattacttgaacttggacaatttaaaaaaacccagattttggtgggtgttaataaagatgaagggacagcttttttagtctatggtgctcctggcttcagcaaagataacaatagtatcataactagaaaagaatttcaggaaggtttaaaaatattttttccaggagtgagtgagtttggaaaggaatccatcctttttcattacacagactgggtagatgatcagagacctgaaaactaccgtgaggccttgggtgatgttgttggggattataatttcatatgccctgccttggagttcaccaagaagttctcagaatggggaaataatgcctttttctactattttgaacaccgatcctccaaacttccgtggccagaatggatgggagtgatgcatggctatgaaattgaatttgtctttggtttacctctggaaagaagagataattacacaaaagccgaggaaattttgagtagatccatagtgaaacggtgggcaaattttgcaaaatatgggaatccaaatgagactcagaacaatagcacaagctggcctgtcttcaaaagcactgaacaaaaatatctaaccttgaatacagagtcaacaagaataatgacgaaactacgtgctcaacaatgtcgattctggacatcattttttccaaaagtcttggaaatgacaggaaatattgatgaagcagaatgggagtggaaagcaggattccatcgctggaacaattacatgatggactggaaaaatcaatttaacgattacactagcaagaaagaaagttgtgtgggtctc

SEQ ID NO: 58 - protein, 574 aa, Artificial Sequence
  synthetic butyrylcholinesterase variant
  VARIANT 227: Xaa = Ala
EDDIIIATKNGKVRGMNLTVFGGTVTAFLGIPYAQPPLGRLRFKKPQSLTKWSDIWNATKYANSCCQNIDQSFPGFHGSEMWNPNTDLSEDCLYLNVWIPAPKPKNATVLIWIYGGGFQTGTSSLHVYDGKFLARVERVIVVSMNYRVGALGFLALPGNPEAPGNMGLFDQQLALQWVQKNIAAFGGNPKSVTLFGESAGAASVSLHLLSPGSHSLFTRAILQSGSXNAPWAVTSLYEARNRTLNLAKLTGCSRENETEIIKCLRNKDPQEILLNEAFVVPYGTPASVNFGPTVDGDFLTDMPDILLELGQFKKTQILVGVNKDEGTAFLVYGAPGFSKDNNSIITRKEFQEGLKIFFPGVSEFGKESILFHYTDWVDDQRPENYREALGDVVGDYNFICPALEFTKKFSEWGNNAFFYYFEHRSSKLPWPEWMGVMHGYEIEFVFGLPLERRDNYTKAEEILSRSIVKRWANFAKYGNPNETQNNSTSWPVFKSTEQKYLTLNTESTRIMTKLRAQQCRFWTSFFPKVLEMTGNIDEAEWEWKAGFHRWNNYMMDWKNQFNDYTSKKESCVGL

SEQ ID NO: 59 - DNA, 1722 bp, Artificial Sequence
  CDS (1)...(1722): synthetic butyrylcholinesterase variant
gaagatgacatcataattgcaacaaagaatggaaaagtcagagggatgaacttgacagtttttggtggcacggtaacagcctttcttggaattccctatgcacagccacctcttggtagacttcgattcaaaaagccacagtctctgaccaagtggtctgatatttggaatgccacaaaatatgcaaattcttgctgtcagaacatagatcaaagttttccaggcttccatggatcagagatgtggaacccaaacactgacctcagtgaagactgtttatatctaaatgtatggattccagcacctaaaccaaaaaatgccactgtattgatatggatttatggtggtggttttcaaactggaacatcatctttacatgtttatgatggcaagtttctggctcgggttgaaagagttattgtagtgtcaatgaactatagggtgggtgccctaggattcttagctttgccaggaaatcctgaggctccagggaacatgggtttatttgatcaacagttggctcttcagtgggttcaaaaaaatatagcagcctttggtggaaatcctaaaagtgtaactctctttggagaaagtgcaggagcagcttcagttagcctgcatttgctttctcctggaagccattcattgttcaccagagccattctgcaaagtggttccgckaatgctccttgggcggtaacatctctttatgaagctaggaacagaacgttgaacttagctaaattgactggttgctctagagagaatgagactgaaataatcaagtgtcttagaaataaagatccccaagaaattcttctgaatgaagcatttgttgtcccctatgggactcctgggtcagtaaactttggtccgaccgtggatggtgattttctcactgacatgccagacatattacttgaacttggacaatttaaaaaaacccagattttggtgggtgttaataaagatgaagggacagcttttttagtctatggtgctcctggcttcagcaaagataacaatagtatcataactagaaaagaatttcaggaaggtttaaaaatattttttccaggagtgagtgagtttggaaaggaatccatcctttttcattacacagactgggtagatgatcagagacctgaaaactaccgtgaggccttgggtgatgttgttggggattataatttcatatgccctgccttggagttcaccaagaagttctcagaatggggaaataatgcctttttctactattttgaacaccgatcctccaaacttccgtggccagaatggatgggagtgatgcatggctatgaaattgaatttgtctttggtttacctctggaaagaagagataattacacaaaagccgaggaaattttgagtagatccatagtgaaacggtgggcaaattttgcaaaatatgggaatccaaatgagactcagaacaatagcacaagctggcctgtcttcaaaagcactgaacaaaaatatctaaccttgaatacagagtcaacaagaataatgacgaaactacgtgctcaacaatgtcgattctggacatcattttttccaaaagtcttggaaatgacaggaaatattgatgaagcagaatgggagtggaaagcaggattccatcgctggaacaattacatgatggactggaaaaatcaatttaacgattacactagcaagaaagaaagttgtgtgggtctc

SEQ ID NO: 60 - protein, 574 aa, Artificial Sequence
  synthetic butyrylcholinesterase variant
  VARIANT 227: Xaa = Ala
EDDIIIATKNGKVRGMNLTVFGGTVTAFLGIPYAQPPLGRLRFKKPQSLTKWSDIWNATKYANSCCQNIDQSFPGFHGSEMWNPNTDLSEDCLYLNVWIPAPKPKNATVLIWIYGGGFQTGTSSLHVYDGKFLARVERVIVVSMNYRVGALGFLALPGNPEAPGNMGLFDQQLALQWVQKNIAAFGGNPKSVTLFGESAGAASVSLHLLSPGSHSLFTRAILQSGSXNAPWAVTSLYEARNRTLNLAKLTGCSRENETEIIKCLRNKDPQEILLNEAFVVPYGTPGSVNFGPTVDGDFLTDMPDILLELGQFKKTQILVGVNKDEGTAFLVYGAPGFSKDNNSIITRKEFQEGLKIFFPGVSEFGKESILFHYTDWVDDQRPENYREALGDVVGDYNFICPALEFTKKFSEWGNNAFFYYFEHRSSKLPWPEWMGVMHGYEIEFVFGLPLERRDNYTKAEEILSRSIVKRWANFAKYGNPNETQNNSTSWPVFKSTEQKYLTLNTESTRIMTKLRAQQCRFWTSFFPKVLEMTGNIDEAEWEWKAGFHRWNNYMMDWKNQFNDYTSKKESCVGL

SEQ ID NO: 61 - DNA, 1722 bp, Artificial Sequence
  CDS (1)...(1722): synthetic butyrylcholinesterase variant
gaagatgacatcataattgcaacaaagaatggaaaagtcagagggatgaacttgacagtttttggtggcacggtaacagcctttcttggaattccctatgcacagccacctcttggtagacttcgattcaaaaagccacagtctctgaccaagtggtctgatatttggaatgccacaaaatatgcaaattcttgctgtcagaacatagatcaaagttttccaggcttccatggatcagagatgtggaacccaaacactgacctcagtgaagactgtttatatctaaatgtatggattccagcacctaaaccaaaaaatgccactgtattgatatggatttatggtggtggttttcaaactggaacatcatctttacatgtttatgatggcaagtttctggctcgggttgaaagagttattgtagtgtcaatgaactatagggtgggtgccctaggattcttagctttgccaggaaatcctgaggctccagggaacatgggtttatttgatcaacagttggctcttcagtgggttcaaaaaaatatagcagcctttggtggaaatcctaaaagtgtaactctctttggagaaagtgcaggagcagcttcagttagcctgcatttgctttctcctggaagccattcattgttcaccagagccattctgcaaagtggttccgckaatgctccttgggcggtaacatctctttatgaagctaggaacagaacgttgaacttagctaaattgactggttgctctagagagaatgagactgaaataatcaagtgtcttagaaataaagatccccaagaaattcttctgaatgaagcatttgttgtcccctatgggactcctaagtcagtaaactttggtccgaccgtggatggtgattttctcactgacatgccagacatattacttgaacttggacaatttaaaaaaacccagattttggtgggtgttaataaagatgaagggacagcttttttagtctatggtgctcctggcttcagcaaagataacaatagtatcataactagaaaagaatttcaggaaggtttaaaaatattttttccaggagtgagtgagtttggaaaggaatccatcctttttcattacacagactgggtagatgatcagagacctgaaaactaccgtgaggccttgggtgatgttgttggggattataatttcatatgccctgccttggagttcaccaagaagttctcagaatggggaaataatgcctttttctactattttgaacaccgatcctccaaacttccgtggccagaatggatgggagtgatgcatggctatgaaattgaatttgtctttggtttacctctggaaagaagagataattacacaaaagccgaggaaattttgagtagatccatagtgaaacggtgggcaaattttgcaaaatatgggaatccaaatgagactcagaacaatagcacaagctggcctgtcttcaaaagcactgaacaaaaatatctaaccttgaatacagagtcaacaagaataatgacgaaactacgtgctcaacaatgtcgattctggacatcattttttccaaaagtcttggaaatgacaggaaatattgatgaagcagaatgggagtggaaagcaggattccatcgctggaacaattacatgatggactggaaaaatcaatttaacgattacactagcaagaaagaaagttgtgtgggtctc

SEQ ID NO: 62 - protein, 574 aa, Artificial Sequence
  synthetic butyrylcholinesterase variant
  VARIANT 227: Xaa = Ala
EDDIIIATKNGKVRGMNLTVFGGTVTAFLGIPYAQPPLGRLRFKKPQSLTKWSDIWNATKYANSCCQNIDQSFPGFHGSEMWNPNTDLSEDCLYLNVWIPAPKPKNATVLIWIYGGGFQTGTSSLHVYDGKFLARVERVIVVSMNYRVGALGFLALPGNPEAPGNMGLFDQQLALQWVQKNIAAFGGNPKSVTLFGESAGAASVSLHLLSPGSHSLFTRAILQSGSXNAPWAVTSLYEARNRTLNLAKLTGCSRENETEIIKCLRNKDPQEILLNEAFVVPYGTPKSVNFGPTVDGDFLTDMPDILLELGQFKKTQILVGVNKDEGTAFLVYGAPGFSKDNNSIITRKEFQEGLKIFFPGVSEFGKESILFHYTDWVDDQRPENYREALGDVVGDYNFICPALEFTKKFSEWGNNAFFYYFEHRSSKLPWPEWMGVMHGYEIEFVFGLPLERRDNYTKAEEILSRSIVKRWANFAKYGNPNETQNNSTSWPVFKSTEQKYLTLNTESTRIMTKLRAQQCRFWTSFFPKVLEMTGNIDEAEWEWKAGFHRWNNYMMDWKNQFNDYTSKKESCVGL

SEQ ID NO: 63 - DNA, 1722 bp, Artificial Sequence
  CDS (1)...(1722): synthetic butyrylcholinesterase variant
gaagatgacatcataattgcaacaaagaatggaaaagtcagagggatgaacttgacagtttttggtggcacggtaacagcctttcttggaattccctatgcacagccacctcttggtagacttcgattcaaaaagccacagtctctgaccaagtggtctgatatttggaatgccacaaaatatgcaaattcttgctgtcagaacatagatcaaagttttccaggcttccatggatcagagatgtggaacccaaacactgacctcagtgaagactgtttatatctaaatgtatggattccagcacctaaaccaaaaaatgccactgtattgatatggatttatggtggtggttttcaaactggaacatcatctttacatgtttatgatggcaagtttctggctcgggttgaaagagttattgtagtgtcaatgaactatagggtgggtgccctaggattcttagctttgccaggaaatcctgaggctccagggaacatgggtttatttgatcaacagttggctcttcagtgggttcaaaaaaatatagcagcctttggtggaaatcctaaaagtgtaactctctttggagaaagtgcaggagcagcttcagttagcctgcatttgctttctcctggaagccattcattgttcaccagagccattctgcaaagtggttccgckaatgctccttgggcggtaacatctctttatgaagctaggaacagaacgttgaacttagctaaattgactggttgctctagagagaatgagactgaaataatcaagtgtcttagaaataaagatccccaagaaattcttctgaatgaagcatttgttgtcccctatgggactcctatgtcagtaaactttggtccgaccgtggatggtgattttctcactgacatgccagacatattacttgaacttggacaatttaaaaaaacccagattttggtgggtgttaataaagatgaagggacagcttttttagtctatggtgctcctggcttcagcaaagataacaatagtatcataactagaaaagaatttcaggaaggtttaaaaatattttttccaggagtgagtgagtttggaaaggaatccatcctttttcattacacagactgggtagatgatcagagacctgaaaactaccgtgaggccttgggtgatgttgttggggattataatttcatatgccctgccttggagttcaccaagaagttctcagaatggggaaataatgcctttttctactattttgaacaccgatcctccaaacttccgtggccagaatggatgggagtgatgcatggctatgaaattgaatttgtctttggtttacctctggaaagaagagataattacacaaaagccgaggaaattttgagtagatccatagtgaaacggtgggcaaattttgcaaaatatgggaatccaaatgagactcagaacaatagcacaagctggcctgtcttcaaaagcactgaacaaaaatatctaaccttgaatacagagtcaacaagaataatgacgaaactacgtgctcaacaatgtcgattctggacatcattttttccaaaagtcttggaaatgacaggaaatattgatgaagcagaatgggagtggaaagcaggattccatcgctggaacaattacatgatggactggaaaaatcaatttaacgattacactagcaagaaagaaagttgtgtgggtctc

SEQ ID NO: 64 - protein, 574 aa, Artificial Sequence
  synthetic butyrylcholinesterase variant
  VARIANT 227: Xaa = Ala
EDDIIIATKNGKVRGMNLTVFGGTVTAFLGIPYAQPPLGRLRFKKPQSLTKWSDIWNATKYANSCCQNIDQSFPGFHGSEMWNPNTDLSEDCLYLNVWIPAPKPKNATVLIWIYGGGFQTGTSSLHVYDGKFLARVERVIVVSMNYRVGALGFLALPGNPEAPGNMGLFDQQLALQWVQKNIAAFGGNPKSVTLFGESAGAASVSLHLLSPGSHSLFTRAILQSGSXNAPWAVTSLYEARNRTLNLAKLTGCSRENETEIIKCLRNKDPQEILLNEAFVVPYGTPMSVNFGPTVDGDFLTDMPDILLELGQFKKTQILVGVNKDEGTAFLVYGAPGFSKDNNSIITRKEFQEGLKIFFPGVSEFGKESILFHYTDWVDDQRPENYREALGDVVGDYNFICPALEFTKKFSEWGNNAFFYYFEHRSSKLPWPEWMGVMHGYEIEFVFGLPLERRDNYTKAEEILSRSIVKRWANFAKYGNPNETQNNSTSWPVFKSTEQKYLTLNTESTRIMTKLRAQQCRFWTSFFPKVLEMTGNIDEAEWEWKAGFHRWNNYMMDWKNQFNDYTSKKESCVGL

SEQ ID NO: 65 - DNA, 1722 bp, Artificial Sequence
  CDS (1)...(1722): synthetic butyrylcholinesterase variant
gaagatgacatcataattgcaacaaagaatggaaaagtcagagggatgaacttgacagtttttggtggcacggtaacagcctttcttggaattccctatgcacagccacctcttggtagacttcgattcaaaaagccacagtctctgaccaagtggtctgatatttggaatgccacaaaatatgcaaattcttgctgtcagaacatagatcaaagttttccaggcttccatggatcagagatgtggaacccaaacactgacctcagtgaagactgtttatatctaaatgtatggattccagcacctaaaccaaaaaatgccactgtattgatatggatttatggtggtggttttcaaactggaacatcatctttacatgtttatgatggcaagtttctggctcgggttgaaagagttattgtagtgtcaatgaactatagggtgggtgccctaggattcttagctttgccaggaaatcctgaggctccagggaacatgggtttatttgatcaacagttggctcttcagtgggttcaaaaaaatatagcagcctttggtggaaatcctaaaagtgtaactctctttggagaaagtgcaggagcagcttcagttagcctgcatttgctttctcctggaagccattcattgttcaccagagccattctgcaaagtggttccgckaatgctccttgggcggtaacatctctttatgaagctaggaacagaacgttgaacttagctaaattgactggttgctctagagagaatgagactgaaataatcaagtgtcttagaaataaagatccccaagaaattcttctgaatgaagcatttgttgtcccctatgggactcctaattcagtaaactttggtccgaccgtggatggtgattttctcactgacatgccagacatattacttgaacttggacaatttaaaaaaacccagattttggtgggtgttaataaagatgaagggacagcttttttagtctatggtgctcctggcttcagcaaagataacaatagtatcataactagaaaagaatttcaggaaggtttaaaaatattttttccaggagtgagtgagtttggaaaggaatccatcctttttcattacacagactgggtagatgatcagagacctgaaaactaccgtgaggccttgggtgatgttgttggggattataatttcatatgccctgccttggagttcaccaagaagttctcagaatggggaaataatgcctttttctactattttgaacaccgatcctccaaacttccgtggccagaatggatgggagtgatgcatggctatgaaattgaatttgtctttggtttacctctggaaagaagagataattacacaaaagccgaggaaattttgagtagatccatagtgaaacggtgggcaaattttgcaaaatatgggaatccaaatgagactcagaacaatagcacaagctggcctgtcttcaaaagcactgaacaaaaatatctaaccttgaatacagagtcaacaagaataatgacgaaactacgtgctcaacaatgtcgattctggacatcattttttccaaaagtcttggaaatgacaggaaatattgatgaagcagaatgggagtggaaagcaggattccatcgctggaacaattacatgatggactggaaaaatcaatttaacgattacactagcaagaaagaaagttgtgtgggtctc

SEQ ID NO: 66 - protein, 574 aa, Artificial Sequence
  synthetic butyrylcholinesterase variant
  VARIANT 227: Xaa = Ala
EDDIIIATKNGKVRGMNLTVFGGTVTAFLGIPYAQPPLGRLRFKKPQSLTKWSDIWNATKYANSCCQNIDQSFPGFHGSEMWNPNTDLSEDCLYLNVWIPAPKPKNATVLIWIYGGGFQTGTSSLHVYDGKFLARVERVIVVSMNYRVGALGFLALPGNPEAPGNMGLFDQQLALQWVQKNIAAFGGNPKSVTLFGESAGAASVSLHLLSPGSHSLFTRAILQSGSXNAPWAVTSLYEARNRTLNLAKLTGCSRENETEIIKCLRNKDPQEILLNEAFVVPYGTPNSVNFGPTVDGDFLTDMPDILLELGQFKKTQILVGVNKDEGTAFLVYGAPGFSKDNNSIITRKEFQEGLKIFFPGVSEFGKESILFHYTDWVDDQRPENYREALGDVVGDYNFICPALEFTKKFSEWGNNAFFYYFEHRSSKLPWPEWMGVMHGYEIEFVFGLPLERRDNYTKAEEILSRSIVKRWANFAKYGNPNETQNNSTSWPVFKSTEQKYLTLNTESTRIMTKLRAQQCRFWTSFFPKVLEMTGNIDEAEWEWKAGFHRWNNYMMDWKNQFNDYTSKKESCVGL

SEQ ID NO: 67 - DNA, 1722 bp, Artificial Sequence
  CDS (1)...(1722): synthetic butyrylcholinesterase variant
gaagatgacatcataattgcaacaaagaatggaaaagtcagagggatgaacttgacagtttttggtggcacggtaacagcctttcttggaattccctatgcacagccacctcttggtagacttcgattcaaaaagccacagtctctgaccaagtggtctgatatttggaatgccacaaaatatgcaaattcttgctgtcagaacatagatcaaagttttccaggcttccatggatcagagatgtggaacccaaacactgacctcagtgaagactgtttatatctaaatgtatggattccagcacctaaaccaaaaaatgccactgtattgatatggatttatggtggtggttttcaaactggaacatcatctttacatgtttatgatggcaagtttctggctcgggttgaaagagttattgtagtgtcaatgaactatagggtgggtgccctaggattcttagctttgccaggaaatcctgaggctccagggaacatgggtttatttgatcaacagttggctcttcagtgggttcaaaaaaatatagcagcctttggtggaaatcctaaaagtgtaactctctttggagaaagtgcaggagcagcttcagttagcctgcatttgctttctcctggaagccattcattgttcaccagagccattctgcaaagtggttccgckaatgctccttgggcggtaacatctctttatgaagctaggaacagaacgttgaacttagctaaattgactggttgctctagagagaatgagactgaaataatcaagtgtcttagaaataaagatccccaagaaattcttctgaatgaagcatttgttgtcccctatgggactcctcgttcagtaaactttggtccgaccgtggatggtgattttctcactgacatgccagacatattacttgaacttggacaatttaaaaaaacccagattttggtgggtgttaataaagatgaagggacagcttttttagtctatggtgctcctggcttcagcaaagataacaatagtatcataactagaaaagaatttcaggaaggtttaaaaatattttttccaggagtgagtgagtttggaaaggaatccatcctttttcattacacagactgggtagatgatcagagacctgaaaactaccgtgaggccttgggtgatgttgttggggattataatttcatatgccctgccttggagttcaccaagaagttctcagaatggggaaataatgcctttttctactattttgaacaccgatcctccaaacttccgtggccagaatggatgggagtgatgcatggctatgaaattgaatttgtctttggtttacctctggaaagaagagataattacacaaaagccgaggaaattttgagtagatccatagtgaaacggtgggcaaattttgcaaaatatgggaatccaaatgagactcagaacaatagcacaagctggcctgtcttcaaaagcactgaacaaaaatatctaaccttgaatacagagtcaacaagaataatgacgaaactacgtgctcaacaatgtcgattctggacatcattttttccaaaagtcttggaaatgacaggaaatattgatgaagcagaatgggagtggaaagcaggattccatcgctggaacaattacatgatggactggaaaaatcaatttaacgattacactagcaagaaagaaagttgtgtgggtctc

SEQ ID NO: 68 - protein, 574 aa, Artificial Sequence
  synthetic butyrylcholinesterase variant
  VARIANT 227: Xaa = Ala
EDDIIIATKNGKVRGMNLTVFGGTVTAFLGIPYAQPPLGRLRFKKPQSLTKWSDIWNATKYANSCCQNIDQSFPGFHGSEMWNPNTDLSEDCLYLNVWIPAPKPKNATVLIWIYGGGFQTGTSSLHVYDGKFLARVERVIVVSMNYRVGALGFLALPGNPEAPGNMGLFDQQLALQWVQKNIAAFGGNPKSVTLFGESAGAASVSLHLLSPGSHSLFTRAILQSGSXNAPWAVTSLYEARNRTLNLAKLTGCSRENETEIIKCLRNKDPQEILLNEAFVVPYGTPRSVNFGPTVDGDFLTDMPDILLELGQFKKTQILVGVNKDEGTAFLVYGAPGFSKDNNSIITRKEFQEGLKIFFPGVSEFGKESILFHYTDWVDDQRPENYREALGDVVGDYNFICPALEFTKKFSEWGNNAFFYYFEHRSSKLPWPEWMGVMHGYEIEFVFGLPLERRDNYTKAEEILSRSIVKRWANFAKYGNPNETQNNSTSWPVFKSTEQKYLTLNTESTRIMTKLRAQQCRFWTSFFPKVLEMTGNIDEAEWEWKAGFHRWNNYMMDWKNQFNDYTSKKESCVGL

SEQ ID NO: 69 - DNA, 1722 bp, Artificial Sequence
  CDS (1)...(1722): synthetic butyrylcholinesterase variant
gaagatgacatcataattgcaacaaagaatggaaaagtcagagggatgaacttgacagtttttggtggcacggtaacagcctttcttggaattccctatgcacagccacctcttggtagacttcgattcaaaaagccacagtctctgaccaagtggtctgatatttggaatgccacaaaatatgcaaattcttgctgtcagaacatagatcaaagttttccaggcttccatggatcagagatgtggaacccaaacactgacctcagtgaagactgtttatatctaaatgtatggattccagcacctaaaccaaaaaatgccactgtattgatatggatttatggtggtggttttcaaactggaacatcatctttacatgtttatgatggcaagtttctggctcgggttgaaagagttattgtagtgtcaatgaactatagggtgggtgccctaggattcttagctttgccaggaaatcctgaggctccagggaacatgggtttatttgatcaacagttggctcttcagtgggttcaaaaaaatatagcagcctttggtggaaatcctaaaagtgtaactctctttggagaaagtgcaggagcagcttcagttagcctgcatttgctttctcctggaagccattcattgttcaccagagccattctgcaaagtggttccgckaatgctccttgggcggtaacatctctttatgaagctaggaacagaacgttgaacttagctaaattgactggttgctctagagagaatgagactgaaataatcaagtgtcttagaaataaagatccccaagaaattcttctgaatgaagcatttgttgtcccctatgggactcctttgtttgtaaactttggtccgaccgtggatggtgattttctcactgacatgccagacatattacttgaacttggacaatttaaaaaaacccagattttggtgggtgttaataaagatgaagggacagcttttttagtctatggtgctcctggcttcagcaaagataacaatagtatcataactagaaaagaatttcaggaaggtttaaaaatattttttccaggagtgagtgagtttggaaaggaatccatcctttttcattacacagactgggtagatgatcagagacctgaaaactaccgtgaggccttgggtgatgttgttggggattataatttcatatgccctgccttggagttcaccaagaagttctcagaatggggaaataatgcctttttctactattttgaacaccgatcctccaaacttccgtggccagaatggatgggagtgatgcatggctatgaaattgaatttgtctttggtttacctctggaaagaagagataattacacaaaagccgaggaaattttgagtagatccatagtgaaacggtgggcaaattttgcaaaatatgggaatccaaatgagactcagaacaatagcacaagctggcctgtcttcaaaagcactgaacaaaaatatctaaccttgaatacagagtcaacaagaataatgacgaaactacgtgctcaacaatgtcgattctggacatcattttttccaaaagtcttggaaatgacaggaaatattgatgaagcagaatgggagtggaaagcaggattccatcgctggaacaattacatgatggactggaaaaatcaatttaacgattacactagcaagaaagaaagttgtgtgggtctc

SEQ ID NO: 70 - protein, 574 aa, Artificial Sequence
  synthetic butyrylcholinesterase variant
  VARIANT 227: Xaa = Ala
EDDIIIATKNGKVRGMNLTVFGGTVTAFLGIPYAQPPLGRLRFKKPQSLTKWSDIWNATKYANSCCQNIDQSFPGFHGSEMWNPNTDLSEDCLYLNVWIPAPKPKNATVLIWIYGGGFQTGTSSLHVYDGKFLARVERVIVVSMNYRVGALGFLALPGNPEAPGNMGLFDQQLALQWVQKNIAAFGGNPKSVTLFGESAGAASVSLHLLSPGSHSLFTRAILQSGSXNAPWAVTSLYEARNRTLNLAKLTGCSRENETEIIKCLRNKDPQEILLNEAFVVPYGTPLFVNFGPTVDGDFLTDMPDILLELGQFKKTQILVGVNKDEGTAFLVYGAPGFSKDNNSIITRKEFQEGLKIFFPGVSEFGKESILFHYTDWVDDQRPENYREALGDVVGDYNFICPALEFTKKFSEWGNNAFFYYFEHRSSKLPWPEWMGVMHGYEIEFVFGLPLERRDNYTKAEEILSRSIVKRWANFAKYGNPNETQNNSTSWPVFKSTEQKYLTLNTESTRIMTKLRAQQCRFWTSFFPKVLEMTGNIDEAEWEWKAGFHRWNNYMMDWKNQFNDYTSKKESCVGL

SEQ ID NO: 71 - DNA, 1722 bp, Artificial Sequence
  CDS (1)...(1722): synthetic butyrylcholinesterase variant
gaagatgacatcataattgcaacaaagaatggaaaagtcagagggatgaacttgacagtttttggtggcacggtaacagcctttcttggaattccctatgcacagccacctcttggtagacttcgattcaaaaagccacagtctctgaccaagtggtctgatatttggaatgccacaaaatatgcaaattcttgctgtcagaacatagatcaaagttttccaggcttccatggatcagagatgtggaacccaaacactgacctcagtgaagactgtttatatctaaatgtatggattccagcacctaaaccaaaaaatgccactgtattgatatggatttatggtggtggttttcaaactggaacatcatctttacatgtttatgatggcaagtttctggctcgggttgaaagagttattgtagtgtcaatgaactatagggtgggtgccctaggattcttagctttgccaggaaatcctgaggctccagggaacatgggtttatttgatcaacagttggctcttcagtgggttcaaaaaaatatagcagcctttggtggaaatcctaaaagtgtaactctctttggagaaagtgcaggagcagcttcagttagcctgcatttgctttctcctggaagccattcattgttcaccagagccattctgcaaagtggttccgckaatgctccttgggcggtaacatctctttatgaagctaggaacagaacgttgaacttagctaaattgactggttgctctagagagaatgagactgaaataatcaagtgtcttagaaataaagatccccaagaaattcttctgaatgaagcatttgttgtcccctatgggactcctttgcatgtaaactttggtccgaccgtggatggtgattttctcactgacatgccagacatattacttgaacttggacaatttaaaaaaacccagattttggtgggtgttaataaagatgaagggacagcttttttagtctatggtgctcctggcttcagcaaagataacaatagtatcataactagaaaagaatttcaggaaggtttaaaaatattttttccaggagtgagtgagtttggaaaggaatccatcctttttcattacacagactgggtagatgatcagagacctgaaaactaccgtgaggccttgggtgatgttgttggggattataatttcatatgccctgccttggagttcaccaagaagttctcagaatggggaaataatgcctttttctactattttgaacaccgatcctccaaacttccgtggccagaatggatgggagtgatgcatggctatgaaattgaatttgtctttggtttacctctggaaagaagagataattacacaaaagccgaggaaattttgagtagatccatagtgaaacggtgggcaaattttgcaaaatatgggaatccaaatgagactcagaacaatagcacaagctggcctgtcttcaaaagcactgaacaaaaatatctaaccttgaatacagagtcaacaagaataatgacgaaactacgtgctcaacaatgtcgattctggacatcattttttccaaaagtcttggaaatgacaggaaatattgatgaagcagaatgggagtggaaagcaggattccatcgctggaacaattacatgatggactggaaaaatcaatttaacgattacactagcaagaaagaaagttgtgtgggtctc

SEQ ID NO: 72 - protein, 574 aa, Artificial Sequence
  synthetic butyrylcholinesterase variant
  VARIANT 227: Xaa = Ala
EDDIIIATKNGKVRGMNLTVFGGTVTAFLGIPYAQPPLGRLRFKKPQSLTKWSDIWNATKYANSCCQNIDQSFPGFHGSEMWNPNTDLSEDCLYLNVWIPAPKPKNATVLIWIYGGGFQTGTSSLHVYDGKFLARVERVIVVSMNYRVGALGFLALPGNPEAPGNMGLFDQQLALQWVQKNIAAFGGNPKSVTLFGESAGAASVSLHLLSPGSHSLFTRAILQSGSXNAPWAVTSLYEARNRTLNLAKLTGCSRENETEIIKCLRNKDPQEILLNEAFVVPYGTPLHVNFGPTVDGDFLTDMPDILLELGQFKKTQILVGVNKDEGTAFLVYGAPGFSKDNNSIITRKEFQEGLKIFFPGVSEFGKESILFHYTDWVDDQRPENYREALGDVVGDYNFICPALEFTKKFSEWGNNAFFYYFEHRSSKLPWPEWMGVMHGYEIEFVFGLPLERRDNYTKAEEILSRSIVKRWANFAKYGNPNETQNNSTSWPVFKSTEQKYLTLNTESTRIMTKLRAQQCRFWTSFFPKVLEMTGNIDEAEWEWKAGFHRWNNYMMDWKNQFNDYTSKKESCVGL

SEQ ID NO: 73 - DNA, 1722 bp, Artificial Sequence
  CDS (1)...(1722): synthetic butyrylcholinesterase variant
gaagatgacatcataattgcaacaaagaatggaaaagtcagagggatgaacttgacagtttttggtggcacggtaacagcctttcttggaattccctatgcacagccacctcttggtagacttcgattcaaaaagccacagtctctgaccaagtggtctgatatttggaatgccacaaaatatgcaaattcttgctgtcagaacatagatcaaagttttccaggcttccatggatcagagatgtggaacccaaacactgacctcagtgaagactgtttatatctaaatgtatggattccagcacctaaaccaaaaaatgccactgtattgatatggatttatggtggtggttttcaaactggaacatcatctttacatgtttatgatggcaagtttctggctcgggttgaaagagttattgtagtgtcaatgaactatagggtgggtgccctaggattcttagctttgccaggaaatcctgaggctccagggaacatgggtttatttgatcaacagttggctcttcagtgggttcaaaaaaatatagcagcctttggtggaaatcctaaaagtgtaactctctttggagaaagtgcaggagcagcttcagttagcctgcatttgctttctcctggaagccattcattgttcaccagagccattctgcaaagtggttccgckaatgctccttgggcggtaacatctctttatgaagctaggaacagaacgttgaacttagctaaattgactggttgctctagagagaatgagactgaaataatcaagtgtcttagaaataaagatccccaagaaattcttctgaatgaagcatttgttgtcccctatgggactcctttgcgtgtaaactttggtccgaccgtggatggtgattttctcactgacatgccagacatattacttgaacttggacaatttaaaaaaacccagattttggtgggtgttaataaagatgaagggacagcttttttagtctatggtgctcctggcttcagcaaagataacaatagtatcataactagaaaagaatttcaggaaggtttaaaaatattttttccaggagtgagtgagtttggaaaggaatccatcctttttcattacacagactgggtagatgatcagagacctgaaaactaccgtgaggccttgggtgatgttgttggggattataatttcatatgccctgccttggagttcaccaagaagttctcagaatggggaaataatgcctttttctactattttgaacaccgatcctccaaacttccgtggccagaatggatgggagtgatgcatggctatgaaattgaatttgtctttggtttacctctggaaagaagagataattacacaaaagccgaggaaattttgagtagatccatagtgaaacggtgggcaaattttgcaaaatatgggaatccaaatgagactcagaacaatagcacaagctggcctgtcttcaaaagcactgaacaaaaatatctaaccttgaatacagagtcaacaagaataatgacgaaactacgtgctcaacaatgtcgattctggacatcattttttccaaaagtcttggaaatgacaggaaatattgatgaagcagaatgggagtggaaagcaggattccatcgctggaacaattacatgatggactggaaaaatcaatttaacgattacactagcaagaaagaaagttgtgtgggtctc

SEQ ID NO: 74 - protein, 574 aa, Artificial Sequence
  synthetic butyrylcholinesterase variant
  VARIANT 227: Xaa = Ala
EDDIIIATKNGKVRGMNLTVFGGTVTAFLGIPYAQPPLGRLRFKKPQSLTKWSDIWNATKYANSCCQNIDQSFPGFHGSEMWNPNTDLSEDCLYLNVWIPAPKPKNATVLIWIYGGGFQTGTSSLHVYDGKFLARVERVIVVSMNYRVGALGFLALPGNPEAPGNMGLFDQQLALQWVQKNIAAFGGNPKSVTLFGESAGAASVSLHLLSPGSHSLFTRAILQSGSXNAPWAVTSLYEARNRTLNLAKLTGCSRENETEIIKCLRNKDPQEILLNEAFVVPYGTPLRVNFGPTVDGDFLTDMPDILLELGQFKKTQILVGVNKDEGTAFLVYGAPGFSKDNNSIITRKEFQEGLKIFFPGVSEFGKESILFHYTDWVDDQRPENYREALGDVVGDYNFICPALEFTKKFSEWGNNAFFYYFEHRSSKLPWPEWMGVMHGYEIEFVFGLPLERRDNYTKAEEILSRSIVKRWANFAKYGNPNETQNNSTSWPVFKSTEQKYLTLNTESTRIMTKLRAQQCRFWTSFFPKVLEMTGNIDEAEWEWKAGFHRWNNYMMDWKNQFNDYTSKKESCVGL

SEQ ID NO: 75 - DNA, 1722 bp, Artificial Sequence
  CDS (1)...(1722): synthetic butyrylcholinesterase variant
gaagatgacatcataattgcaacaaagaatggaaaagtcagagggatgaacttgacagtttttggtggcacggtaacagcctttcttggaattccctatgcacagccacctcttggtagacttcgattcaaaaagccacagtctctgaccaagtggtctgatatttggaatgccacaaaatatgcaaattcttgctgtcagaacatagatcaaagttttccaggcttccatggatcagagatgtggaacccaaacactgacctcagtgaagactgtttatatctaaatgtatggattccagcacctaaaccaaaaaatgccactgtattgatatggatttatggtggtggttttcaaactggaacatcatctttacatgtttatgatggcaagtttctggctcgggttgaaagagttattgtagtgtcaatgaactatagggtgggtgccctaggattcttagctttgccaggaaatcctgaggctccagggaacatgggtttatttgatcaacagttggctcttcagtgggttcaaaaaaatatagcagcctttggtggaaatcctaaaagtgtaactctctttggagaaagtgcaggagcagcttcagttagcctgcatttgctttctcctggaagccattcattgttcaccagagccattctgcaaagtggttccgckaatgctccttgggcggtaacatctctttatgaagctaggaacagaacgttgaacttagctaaattgactggttgctctagagagaatgagactgaaataatcaagtgtcttagaaataaagatccccaagaaattcttctgaatgaagcatttgttgtcccctatgggactcctttgactgtaaactttggtccgaccgtggatggtgattttctcactgacatgccagacatattacttgaacttggacaatttaaaaaaacccagattttggtgggtgttaataaagatgaagggacagcttttttagtctatggtgctcctggcttcagcaaagataacaatagtatcataactagaaaagaatttcaggaaggtttaaaaatattttttccaggagtgagtgagtttggaaaggaatccatcctttttcattacacagactgggtagatgatcagagacctgaaaactaccgtgaggccttgggtgatgttgttggggattataatttcatatgccctgccttggagttcaccaagaagttctcagaatggggaaataatgcctttttctactattttgaacaccgatcctccaaacttccgtggccagaatggatgggagtgatgcatggctatgaaattgaatttgtctttggtttacctctggaaagaagagataattacacaaaagccgaggaaattttgagtagatccatagtgaaacggtgggcaaattttgcaaaatatgggaatccaaatgagactcagaacaatagcacaagctggcctgtcttcaaaagcactgaacaaaaatatctaaccttgaatacagagtcaacaagaataatgacgaaactacgtgctcaacaatgtcgattctggacatcattttttccaaaagtcttggaaatgacaggaaatattgatgaagcagaatgggagtggaaagcaggattccatcgctggaacaattacatgatggactggaaaaatcaatttaacgattacactagcaagaaagaaagttgtgtgggtctc

SEQ ID NO: 76 - protein, 574 aa, Artificial Sequence
  synthetic butyrylcholinesterase variant
  VARIANT 227: Xaa = Ala
EDDIIIATKNGKVRGMNLTVFGGTVTAFLGIPYAQPPLGRLRFKKPQSLTKWSDIWNATKYANSCCQNIDQSFPGFHGSEMWNPNTDLSEDCLYLNVWIPAPKPKNATVLIWIYGGGFQTGTSSLHVYDGKFLARVERVIVVSMNYRVGALGFLALPGNPEAPGNMGLFDQQLALQWVQKNIAAFGGNPKSVTLFGESAGAASVSLHLLSPGSHSLFTRAILQSGSXNAPWAVTSLYEARNRTLNLAKLTGCSRENETEIIKCLRNKDPQEILLNEAFVVPYGTPLTVNFGPTVDGDFLTDMPDILLELGQFKKTQILVGVNKDEGTAFLVYGAPGFSKDNNSIITRKEFQEGLKIFFPGVSEFGKESILFHYTDWVDDQRPENYREALGDVVGDYNFICPALEFTKKFSEWGNNAFFYYFEHRSSKLPWPEWMGVMHGYEIEFVFGLPLERRDNYTKAEEILSRSIVKRWANFAKYGNPNETQNNSTSWPVFKSTEQKYLTLNTESTRIMTKLRAQQCRFWTSFFPKVLEMTGNIDEAEWEWKAGFHRWNNYMMDWKNQFNDYTSKKESCVGL

SEQ ID NO: 77 - DNA, 1722 bp, Artificial Sequence
  CDS (1)...(1722): synthetic butyrylcholinesterase variant
gaagatgacatcataattgcaacaaagaatggaaaagtcagagggatgaacttgacagtttttggtggcacggtaacagcctttcttggaattccctatgcacagccacctcttggtagacttcgattcaaaaagccacagtctctgaccaagtggtctgatatttggaatgccacaaaatatgcaaattcttgctgtcagaacatagatcaaagttttccaggcttccatggatcagagatgtggaacccaaacactgacctcagtgaagactgtttatatctaaatgtatggattccagcacctaaaccaaaaaatgccactgtattgatatggatttatggtggtggttttcaaactggaacatcatctttacatgtttatgatggcaagtttctggctcgggttgaaagagttattgtagtgtcaatgaactatagggtgggtgccctaggattcttagctttgccaggaaatcctgaggctccagggaacatgggtttatttgatcaacagttggctcttcagtgggttcaaaaaaatatagcagcctttggtggaaatcctaaaagtgtaactctctttggagaaagtgcaggagcagcttcagttagcctgcatttgctttctcctggaagccattcattgttcaccagagccattctgcaaagtggttccgckaatgctccttgggcggtaacatctctttatgaagctaggaacagaacgttgaacttagctaaattgactggttgctctagagagaatgagactgaaataatcaagtgtcttagaaataaagatccccaagaaattcttctgaatgaagcatttgttgtcccctatgggactcctttgtcagtaaactttggtccgaccgtggatggtgattttctcactgacatgccagacatattacttgaacttggacaatttaaaaaaacccagattttggtgggtgttaataaagatgaaggggctgcttttttagtctatggtgctcctggcttcagcaaagataacaatagtatcataactagaaaagaatttcaggaaggtttaaaaatattttttccaggagtgagtgagtttggaaaggaatccatcctttttcattacacagactgggtagatgatcagagacctgaaaactaccgtgaggccttgggtgatgttgttggggattataatttcatatgccctgccttggagttcaccaagaagttctcagaatggggaaataatgcctttttctactattttgaacaccgatcctccaaacttccgtggccagaatggatgggagtgatgcatggctatgaaattgaatttgtctttggtttacctctggaaagaagagataattacacaaaagccgaggaaattttgagtagatccatagtgaaacggtgggcaaattttgcaaaatatgggaatccaaatgagactcagaacaatagcacaagctggcctgtcttcaaaagcactgaacaaaaatatctaaccttgaatacagagtcaacaagaataatgacgaaactacgtgctcaacaatgtcgattctggacatcattttttccaaaagtcttggaaatgacaggaaatattgatgaagcagaatgggagtggaaagcaggattccatcgctggaacaattacatgatggactggaaaaatcaatttaacgattacactagcaagaaagaaagttgtgtgggtctc

SEQ ID NO: 78 - protein, 574 aa, Artificial Sequence
  synthetic butyrylcholinesterase variant
  VARIANT 227: Xaa = Ala
EDDIIIATKNGKVRGMNLTVFGGTVTAFLGIPYAQPPLGRLRFKKPQSLTKWSDIWNATKYANSCCQNIDQSFPGFHGSEMWNPNTDLSEDCLYLNVWIPAPKPKNATVLIWIYGGGFQTGTSSLHVYDGKFLARVERVIVVSMNYRVGALGFLALPGNPEAPGNMGLFDQQLALQWVQKNIAAFGGNPKSVTLFGESAGAASVSLHLLSPGSHSLFTRAILQSGSXNAPWAVTSLYEARNRTLNLAKLTGCSRENETEIIKCLRNKDPQEILLNEAFVVPYGTPLSVNFGPTVDGDFLTDMPDILLELGQFKKTQILVGVNKDEGAAFLVYGAPGFSKDNNSIITRKEFQEGLKIFFPGVSEFGKESILFHYTDWVDDQRPENYREALGDVVGDYNFICPALEFTKKFSEWGNNAFFYYFEHRSSKLPWPEWMGVMHGYEIEFVFGLPLERRDNYTKAEEILSRSIVKRWANFAKYGNPNETQNNSTSWPVFKSTEQKYLTLNTESTRIMTKLRAQQCRFWTSFFPKVLEMTGNIDEAEWEWKAGFHRWNNYMMDWKNQFNDYTSKKESCVGL

SEQ ID NO: 79 - DNA, 1722 bp, Artificial Sequence
  CDS (1)...(1722): synthetic butyrylcholinesterase variant
gaagatgacatcataattgcaacaaagaatggaaaagtcagagggatgaacttgacagtttttggtggcacggtaacagcctttcttggaattccctatgcacagccacctcttggtagacttcgattcaaaaagccacagtctctgaccaagtggtctgatatttggaatgccacaaaatatgcaaattcttgctgtcagaacatagatcaaagttttccaggcttccatggatcagagatgtggaacccaaacactgacctcagtgaagactgtttatatctaaatgtatggattccagcacctaaaccaaaaaatgccactgtattgatatggatttatggtggtggttttcaaactggaacatcatctttacatgtttatgatggcaagtttctggctcgggttgaaagagttattgtagtgtcaatgaactatagggtgggtgccctaggattcttagctttgccaggaaatcctgaggctccagggaacatgggtttatttgatcaacagttggctcttcagtgggttcaaaaaaatatagcagcctttggtggaaatcctaaaagtgtaactctctttggagaaagtgcaggagcagcttcagttagcctgcatttgctttctcctggaagccattcattgttcaccagagccattctgcaaagtggttccgckaatgctccttgggcggtaacatctctttatgaagctaggaacagaacgttgaacttagctaaattgactggttgctctagagagaatgagactgaaataatcaagtgtcttagaaataaagatccccaagaaattcttctgaatgaagcatttgttgtcccctatgggactcctttgtcagtaaactttggtccgaccgtggatggtgattttctcactgacatgccagacatattacttgaacttggacaatttaaaaaaacccagattttggtgggtgttaataaagatgaagggcctgcttttttagtctatggtgctcctggcttcagcaaagataacaatagtatcataactagaaaagaatttcaggaaggtttaaaaatattttttccaggagtgagtgagtttggaaaggaatccatcctttttcattacacagactgggtagatgatcagagacctgaaaactaccgtgaggccttgggtgatgttgttggggattataatttcatatgccctgccttggagttcaccaagaagttctcagaatggggaaataatgcctttttctactattttgaacaccgatcctccaaacttccgtggccagaatggatgggagtgatgcatggctatgaaattgaatttgtctttggtttacctctggaaagaagagataattacacaaaagccgaggaaattttgagtagatccatagtgaaacggtgggcaaattttgcaaaatatgggaatccaaatgagactcagaacaatagcacaagctggcctgtcttcaaaagcactgaacaaaaatatctaaccttgaatacagagtcaacaagaataatgacgaaactacgtgctcaacaatgtcgattctggacatcattttttccaaaagtcttggaaatgacaggaaatattgatgaagcagaatgggagtggaaagcaggattccatcgctggaacaattacatgatggactggaaaaatcaatttaacgattacactagcaagaaagaaagttgtgtgggtctc

SEQ ID NO: 80 - protein, 574 aa, Artificial Sequence
  synthetic butyrylcholinesterase variant
  VARIANT 227: Xaa = Ala
EDDIIIATKNGKVRGMNLTVFGGTVTAFLGIPYAQPPLGRLRFKKPQSLTKWSDIWNATKYANSCCQNIDQSFPGFHGSEMWNPNTDLSEDCLYLNVWIPAPKPKNATVLIWIYGGGFQTGTSSLHVYDGKFLARVERVIVVSMNYRVGALGFLALPGNPEAPGNMGLFDQQLALQWVQKNIAAFGGNPKSVTLFGESAGAASVSLHLLSPGSHSLFTRAILQSGSXNAPWAVTSLYEARNRTLNLAKLTGCSRENETEIIKCLRNKDPQEILLNEAFVVPYGTPLSVNFGPTVDGDFLTDMPDILLELGQFKKTQILVGVNKDEGPAFLVYGAPGFSKDNNSIITRKEFQEGLKIFFPGVSEFGKESILFHYTDWVDDQRPENYREALGDVVGDYNFICPALEFTKKFSEWGNNAFFYYFEHRSSKLPWPEWMGVMHGYEIEFVFGLPLERRDNYTKAEEILSRSIVKRWANFAKYGNPNETQNNSTSWPVFKSTEQKYLTLNTESTRIMTKLRAQQCRFWTSFFPKVLEMTGNIDEAEWEWKAGFHRWNNYMMDWKNQFNDYTSKKESCVGL

SEQ ID NO: 81 - DNA, 1722 bp, Artificial Sequence
  CDS (1)...(1722): synthetic butyrylcholinesterase variant
gaagatgacatcataattgcaacaaagaatggaaaagtcagagggatgaacttgacagtttttggtggcacggtaacagcctttcttggaattccctatgcacagccacctcttggtagacttcgattcaaaaagccacagtctctgaccaagtggtctgatatttggaatgccacaaaatatgcaaattcttgctgtcagaacatagatcaaagttttccaggcttccatggatcagagatgtggaacccaaacactgacctcagtgaagactgtttatatctaaatgtatggattccagcacctaaaccaaaaaatgccactgtattgatatggatttatggtggtggttttcaaactggaacatcatctttacatgtttatgatggcaagtttctggctcgggttgaaagagttattgtagtgtcaatgaactatagggtgggtgccctaggattcttagctttgccaggaaatcctgaggctccagggaacatgggtttatttgatcaacagttggctcttcagtgggttcaaaaaaatatagcagcctttggtggaaatcctaaaagtgtaactctctttggagaaagtgcaggagcagcttcagttagcctgcatttgctttctcctggaagccattcattgttcaccagagccattctgcaaagtggttccgckaatgctccttgggcggtaacatctctttatgaagctaggaacagaacgttgaacttagctaaattgactggttgctctagagagaatgagactgaaataatcaagtgtcttagaaataaagatccccaagaaattcttctgaatgaagcatttgttgtcccctatgggactcctttgtcagtaaactttggtccgaccgtggatggtgattttctcactgacatgccagacatattacttgaacttggacaatttaaaaaaacccagattttggtgggtgttaataaagatgaagggacagctcttttagtctatggtgctcctggcttcagcaaagataacaatagtatcataactagaaaagaatttcaggaaggtttaaaaatattttttccaggagtgagtgagtttggaaaggaatccatcctttttcattacacagactgggtagatgatcagagacctgaaaactaccgtgaggccttgggtgatgttgttggggattataatttcatatgccctgccttggagttcaccaagaagttctcagaatggggaaataatgcctttttctactattttgaacaccgatcctccaaacttccgtggccagaatggatgggagtgatgcatggctatgaaattgaatttgtctttggtttacctctggaaagaagagataattacacaaaagccgaggaaattttgagtagatccatagtgaaacggtgggcaaattttgcaaaatatgggaatccaaatgagactcagaacaatagcacaagctggcctgtcttcaaaagcactgaacaaaaatatctaaccttgaatacagagtcaacaagaataatgacgaaactacgtgctcaacaatgtcgattctggacatcattttttccaaaagtcttggaaatgacaggaaatattgatgaagcagaatgggagtggaaagcaggattccatcgctggaacaattacatgatggactggaaaaatcaatttaacgattacactagcaagaaagaaagttgtgtgggtctc

SEQ ID NO: 82 - protein, 574 aa, Artificial Sequence
  synthetic butyrylcholinesterase variant
  VARIANT 227: Xaa = Ala
EDDIIIATKNGKVRGMNLTVFGGTVTAFLGIPYAQPPLGRLRFKKPQSLTKWSDIWNATKYANSCCQNIDQSFPGFHGSEMWNPNTDLSEDCLYLNVWIPAPKPKNATVLIWIYGGGFQTGTSSLHVYDGKFLARVERVIVVSMNYRVGALGFLALPGNPEAPGNMGLFDQQLALQWVQKNIAAFGGNPKSVTLFGESAGAASVSLHLLSPGSHSLFTRAILQSGSXNAPWAVTSLYEARNRTLNLAKLTGCSRENETEIIKCLRNKDPQEILLNEAFVVPYGTPLSVNFGPTVDGDFLTDMPDILLELGQFKKTQILVGVNKDEGTALLVYGAPGFSKDNNSIITRKEFQEGLKIFFPGVSEFGKESILFHYTDWVDDQRPENYREALGDVVGDYNFICPALEFTKKFSEWGNNAFFYYFEHRSSKLPWPEWMGVMHGYEIEFVFGLPLERRDNYTKAEEILSRSIVKRWANFAKYGNPNETQNNSTSWPVFKSTEQKYLTLNTESTRIMTKLRAQQCRFWTSFFPKVLEMTGNIDEAEWEWKAGFHRWNNYMMDWKNQFNDYTSKKESCVGL

SEQ ID NO: 83 - DNA, 1722 bp, Artificial Sequence
  CDS (1)...(1722): synthetic butyrylcholinesterase variant
gaagatgacatcataattgcaacaaagaatggaaaagtcagagggatgaacttgacagtttttggtggcacggtaacagcctttcttggaattccctatgcacagccacctcttggtagacttcgattcaaaaagccacagtctctgaccaagtggtctgatatttggaatgccacaaaatatgcaaattcttgctgtcagaacatagatcaaagttttccaggcttccatggatcagagatgtggaacccaaacactgacctcagtgaagactgtttatatctaaatgtatggattccagcacctaaaccaaaaaatgccactgtattgatatggatttatggtggtggttttcaaactggaacatcatctttacatgtttatgatggcaagtttctggctcgggttgaaagagttattgtagtgtcaatgaactatagggtgggtgccctaggattcttagctttgccaggaaatcctgaggctccagggaacatgggtttatttgatcaacagttggctcttcagtgggttcaaaaaaatatagcagcctttggtggaaatcctaaaagtgtaactctctttggagaaagtgcaggagcagcttcagttagcctgcatttgctttctcctggaagccattcattgttcaccagagccattctgcaaagtggttccgckaatgctccttgggcggtaacatctctttatgaagctaggaacagaacgttgaacttagctaaattgactggttgctctagagagaatgagactgaaataatcaagtgtcttagaaataaagatccccaagaaattcttctgaatgaagcatttgttgtcccctatgggactcctttgtcagtaaactttggtccgaccgtggatggtgattttctcactgacatgccagacatattacttgaacttggacaatttaaaaaaacccagattttggtgggtgttaataaagatgaagggacagctttttcggtctatggtgctcctggcttcagcaaagataacaatagtatcataactagaaaagaatttcaggaaggtttaaaaatattttttccaggagtgagtgagtttggaaaggaatccatcctttttcattacacagactgggtagatgatcagagacctgaaaactaccgtgaggccttgggtgatgttgttggggattataatttcatatgccctgccttggagttcaccaagaagttctcagaatggggaaataatgcctttttctactattttgaacaccgatcctccaaacttccgtggccagaatggatgggagtgatgcatggctatgaaattgaatttgtctttggtttacctctggaaagaagagataattacacaaaagccgaggaaattttgagtagatccatagtgaaacggtgggcaaattttgcaaaatatgggaatccaaatgagactcagaacaatagcacaagctggcctgtcttcaaaagcactgaacaaaaatatctaaccttgaatacagagtcaacaagaataatgacgaaactacgtgctcaacaatgtcgattctggacatcattttttccaaaagtcttggaaatgacaggaaatattgatgaagcagaatgggagtggaaagcaggattccatcgctggaacaattacatgatggactggaaaaatcaatttaacgattacactagcaagaaagaaagttgtgtgggtctc

SEQ ID NO: 84 - protein, 574 aa, Artificial Sequence
  synthetic butyrylcholinesterase variant
  VARIANT 227: Xaa = Ala
EDDIIIATKNGKVRGMNLTVFGGTVTAFLGIPYAQPPLGRLRFKKPQSLTKWSDIWNATKYANSCCQNIDQSFPGFHGSEMWNPNTDLSEDCLYLNVWIPAPKPKNATVLIWIYGGGFQTGTSSLHVYDGKFLARVERVIVVSMNYRVGALGFLALPGNPEAPGNMGLFDQQLALQWVQKNIAAFGGNPKSVTLFGESAGAASVSLHLLSPGSHSLFTRAILQSGSXNAPWAVTSLYEARNRTLNLAKLTGCSRENETEIIKCLRNKDPQEILLNEAFVVPYGTPLSVNFGPTVDGDFLTDMPDILLELGQFKKTQILVGVNKDEGTAFSVYGAPGFSKDNNSIITRKEFQEGLKIFFPGVSEFGKESILFHYTDWVDDQRPENYREALGDVVGDYNFICPALEFTKKFSEWGNNAFFYYFEHRSSKLPWPEWMGVMHGYEIEFVFGLPLERRDNYTKAEEILSRSIVKRWANFAKYGNPNETQNNSTSWPVFKSTEQKYLTLNTESTRIMTKLRAQQCRFWTSFFPKVLEMTGNIDEAEWEWKAGFHRWNNYMMDWKNQFNDYTSKKESCVGL

SEQ ID NO: 85 - DNA, 1722 bp, Artificial Sequence
  CDS (1)...(1722): synthetic butyrylcholinesterase variant
gaagatgacatcataattgcaacaaagaatggaaaagtcagagggatgaacttgacagtttttggtggcacggtaacagcctttcttggaattccctatgcacagccacctcttggtagacttcgattcaaaaagccacagtctctgaccaagtggtctgatatttggaatgccacaaaatatgcaaattcttgctgtcagaacatagatcaaagttttccaggcttccatggatcagagatgtggaacccaaacactgacctcagtgaagactgtttatatctaaatgtatggattccagcacctaaaccaaaaaatgccactgtattgatatggatttatggtggtggttttcaaactggaacatcatctttacatgtttatgatggcaagtttctggctcgggttgaaagagttattgtagtgtcaatgaactatagggtgggtgccctaggattcttagctttgccaggaaatcctgaggctccagggaacatgggtttatttgatcaacagttggctcttcagtgggttcaaaaaaatatagcagcctttggtggaaatcctaaaagtgtaactctctttggagaaagtgcaggagcagcttcagttagcctgcatttgctttctcctggaagccattcattgttcaccagagccattctgcaaagtggttccgckaatgctccttgggcggtaacatctctttatgaagctaggaacagaacgttgaacttagctaaattgactggttgctctagagagaatgagactgaaataatcaagtgtcttagaaataaagatccccaagaaattcttctgaatgaagcatttgttgtcccctatgggactcctttgtcagtaaactttggtccgaccgtggatggtgattttctcactgacatgccagacatattacttgaacttggacaatttaaaaaaacccagattttggtgggtgttaataaagatgaagggacagcttttttagcgtatggtgctcctggcttcagcaaagataacaatagtatcataactagaaaagaatttcaggaaggtttaaaaatattttttccaggagtgagtgagtttggaaaggaatccatcctttttcattacacagactgggtagatgatcagagacctgaaaactaccgtgaggccttgggtgatgttgttggggattataatttcatatgccctgccttggagttcaccaagaagttctcagaatggggaaataatgcctttttctactattttgaacaccgatcctccaaacttccgtggccagaatggatgggagtgatgcatggctatgaaattgaatttgtctttggtttacctctggaaagaagagataattacacaaaagccgaggaaattttgagtagatccatagtgaaacggtgggcaaattttgcaaaatatgggaatccaaatgagactcagaacaatagcacaagctggcctgtcttcaaaagcactgaacaaaaatatctaaccttgaatacagagtcaacaagaataatgacgaaactacgtgctcaacaatgtcgattctggacatcattttttccaaaagtcttggaaatgacaggaaatattgatgaagcagaatgggagtggaaagcaggattccatcgctggaacaattacatgatggactggaaaaatcaatttaacgattacactagcaagaaagaaagttgtgtgggtctc

SEQ ID NO: 86 - protein, 574 aa, Artificial Sequence
  synthetic butyrylcholinesterase variant
  VARIANT 227: Xaa = Ala
EDDIIIATKNGKVRGMNLTVFGGTVTAFLGIPYAQPPLGRLRFKKPQSLTKWSDIWNATKYANSCCQNIDQSFPGFHGSEMWNPNTDLSEDCLYLNVWIPAPKPKNATVLIWIYGGGFQTGTSSLHVYDGKFLARVERVIVVSMNYRVGALGFLALPGNPEAPGNMGLFDQQLALQWVQKNIAAFGGNPKSVTLFGESAGAASVSLHLLSPGSHSLFTRAILQSGSXNAPWAVTSLYEARNRTLNLAKLTGCSRENETEIIKCLRNKDPQEILLNEAFVVPYGTPLSVNFGPTVDGDFLTDMPDILLELGQFKKTQILVGVNKDEGTAFLAYGAPGFSKDNNSIITRKEFQEGLKIFFPGVSEFGKESILFHYTDWVDDQRPENYREALGDVVGDYNFICPALEFTKKFSEWGNNAFFYYFEHRSSKLPWPEWMGVMHGYEIEFVFGLPLERRDNYTKAEEILSRSIVKRWANFAKYGNPNETQNNSTSWPVFKSTEQKYLTLNTESTRIMTKLRAQQCRFWTSFFPKVLEMTGNIDEAEWEWKAGFHRWNNYMMDWKNQFNDYTSKKESCVGL

SEQ ID NO: 87 - DNA, 1722 bp, Artificial Sequence
  CDS (1)...(1722): synthetic butyrylcholinesterase variant
gaagatgacatcataattgcaacaaagaatggaaaagtcagagggatgaacttgacagtttttggtggcacggtaacagcctttcttggaattccctatgcacagccacctcttggtagacttcgattcaaaaagccacagtctctgaccaagtggtctgatatttggaatgccacaaaatatgcaaattcttgctgtcagaacatagatcaaagttttccaggcttccatggatcagagatgtggaacccaaacactgacctcagtgaagactgtttatatctaaatgtatggattccagcacctaaaccaaaaaatgccactgtattgatatggatttatggtggtggttttcaaactggaacatcatctttacatgtttatgatggcaagtttctggctcgggttgaaagagttattgtagtgtcaatgaactatagggtgggtgccctaggattcttagctttgccaggaaatcctgaggctccagggaacatgggtttatttgatcaacagttggctcttcagtgggttcaaaaaaatatagcagcctttggtggaaatcctaaaagtgtaactctctttggagaaagtgcaggagcagcttcagttagcctgcatttgctttctcctggaagccattcattgttcaccagagccattctgcaaagtggttccgckaatgctccttgggcggtaacatctctttatgaagctaggaacagaacgttgaacttagctaaattgactggttgctctagagagaatgagactgaaataatcaagtgtcttagaaataaagatccccaagaaattcttctgaatgaagcatttgttgtcccctatgggactcctttgtcagtaaactttggtccgaccgtggatggtgattttctcactgacatgccagacatattacttgaacttggacaatttaaaaaaacccagattttggtgggtgttaataaagatgaagggacagcttttttaggttatggtgctcctggcttcagcaaagataacaatagtatcataactagaaaagaatttcaggaaggtttaaaaatattttttccaggagtgagtgagtttggaaaggaatccatcctttttcattacacagactgggtagatgatcagagacctgaaaactaccgtgaggccttgggtgatgttgttggggattataatttcatatgccctgccttggagttcaccaagaagttctcagaatggggaaataatgcctttttctactattttgaacaccgatcctccaaacttccgtggccagaatggatgggagtgatgcatggctatgaaattgaatttgtctttggtttacctctggaaagaagagataattacacaaaagccgaggaaattttgagtagatccatagtgaaacggtgggcaaattttgcaaaatatgggaatccaaatgagactcagaacaatagcacaagctggcctgtcttcaaaagcactgaacaaaaatatctaaccttgaatacagagtcaacaagaataatgacgaaactacgtgctcaacaatgtcgattctggacatcattttttccaaaagtcttggaaatgacaggaaatattgatgaagcagaatgggagtggaaagcaggattccatcgctggaacaattacatgatggactggaaaaatcaatttaacgattacactagcaagaaagaaagttgtgtgggtctc

SEQ ID NO: 88 - protein, 574 aa, Artificial Sequence
  synthetic butyrylcholinesterase variant
  VARIANT 227: Xaa = Ala
EDDIIIATKNGKVRGMNLTVFGGTVTAFLGIPYAQPPLGRLRFKKPQSLTKWSDIWNATKYANSCCQNIDQSFPGFHGSEMWNPNTDLSEDCLYLNVWIPAPKPKNATVLIWIYGGGFQTGTSSLHVYDGKFLARVERVIVVSMNYRVGALGFLALPGNPEAPGNMGLFDQQLALQWVQKNIAAFGGNPKSVTLFGESAGAASVSLHLLSPGSHSLFTRAILQSGSXNAPWAVTSLYEARNRTLNLAKLTGCSRENETEIIKCLRNKDPQEILLNEAFVVPYGTPLSVNFGPTVDGDFLTDMPDILLELGQFKKTQILVGVNKDEGTAFLGYGAPGFSKDNNSIITRKEFQEGLKIFFPGVSEFGKESILFHYTDWVDDQRPENYREALGDVVGDYNFICPALEFTKKFSEWGNNAFFYYFEHRSSKLPWPEWMGVMHGYEIEFVFGLPLERRDNYTKAEEILSRSIVKRWANFAKYGNPNETQNNSTSWPVFKSTEQKYLTLNTESTRIMTKLRAQQCRFWTSFFPKVLEMTGNIDEAEWEWKAGFHRWNNYMMDWKNQFNDYTSKKESCVGL

SEQ ID NO: 89 - DNA, 1722 bp, Artificial Sequence
  CDS (1)...(1722): synthetic butyrylcholinesterase variant
gaagatgacatcataattgcaacaaagaatggaaaagtcagagggatgaacttgacagtttttggtggcacggtaacagcctttcttggaattccctatgcacagccacctcttggtagacttcgattcaaaaagccacagtctctgaccaagtggtctgatatttggaatgccacaaaatatgcaaattcttgctgtcagaacatagatcaaagttttccaggcttccatggatcagagatgtggaacccaaacactgacctcagtgaagactgtttatatctaaatgtatggattccagcacctaaaccaaaaaatgccactgtattgatatggatttatggtggtggttttcaaactggaacatcatctttacatgtttatgatggcaagtttctggctcgggttgaaagagttattgtagtgtcaatgaactatagggtgggtgccctaggattcttagctttgccaggaaatcctgaggctccagggaacatgggtttatttgatcaacagttggctcttcagtgggttcaaaaaaatatagcagcctttggtggaaatcctaaaagtgtaactctctttggagaaagtgcaggagcagcttcagttagcctgcatttgctttctcctggaagccattcattgttcaccagagccattctgcaaagtggttccgckaatgctccttgggcggtaacatctctttatgaagctaggaacagaacgttgaacttagctaaattgactggttgctctagagagaatgagactgaaataatcaagtgtcttagaaataaagatccccaagaaattcttctgaatgaagcatttgttgtcccctatgggactcctttgtcagtaaactttggtccgaccgtggatggtgattttctcactgacatgccagacatattacttgaacttggacaatttaaaaaaacccagattttggtgggtgttaataaagatgaagggacagcttttttaccttatggtcctcctggcttcagcaaagataacaatagtatcataactagaaaagaatttcaggaaggtttaaaaatattttttccaggagtgagtgagtttggaaaggaatccatcctttttcattacacagactgggtagatgatcagagacctgaaaactaccgtgaggccttgggtgatgttgttggggattataatttcatatgccctgccttggagttcaccaagaagttctcagaatggggaaataatgcctttttctactattttgaacaccgatcctccaaacttccgtggccagaatggatgggagtgatgcatggctatgaaattgaatttgtctttggtttacctctggaaagaagagataattacacaaaagccgaggaaattttgagtagatccatagtgaaacggtgggcaaattttgcaaaatatgggaatccaaatgagactcagaacaatagcacaagctggcctgtcttcaaaagcactgaacaaaaatatctaaccttgaatacagagtcaacaagaataatgacgaaactacgtgctcaacaatgtcgattctggacatcattttttccaaaagtcttggaaatgacaggaaatattgatgaagcagaatgggagtggaaagcaggattccatcgctggaacaattacatgatggactggaaaaatcaatttaacgattacactagcaagaaagaaagttgtgtgggtctc

SEQ ID NO: 90 - protein, 574 aa, Artificial Sequence
  synthetic butyrylcholinesterase variant
  VARIANT 227: Xaa = Ala
EDDIIIATKNGKVRGMNLTVFGGTVTAFLGIPYAQPPLGRLRFKKPQSLTKWSDIWNATKYANSCCQNIDQSFPGFHGSEMWNPNTDLSEDCLYLNVWIPAPKPKNATVLIWIYGGGFQTGTSSLHVYDGKFLARVERVIVVSMNYRVGALGFLALPGNPEAPGNMGLFDQQLALQWVQKNIAAFGGNPKSVTLFGESAGAASVSLHLLSPGSHSLFTRAILQSGSXNAPWAVTSLYEARNRTLNLAKLTGCSRENETEIIKCLRNKDPQEILLNEAFVVPYGTPLSVNFGPTVDGDFLTDMPDILLELGQFKKTQILVGVNKDEGTAFLPYGPPGFSKDNNSIITRKEFQEGLKIFFPGVSEFGKESILFHYTDWVDDQRPENYREALGDVVGDYNFICPALEFTKKFSEWGNNAFFYYFEHRSSKLPWPEWMGVMHGYEIEFVFGLPLERRDNYTKAEEILSRSIVKRWANFAKYGNPNETQNNSTSWPVFKSTEQKYLTLNTESTRIMTKLRAQQCRFWTSFFPKVLEMTGNIDEAEWEWKAGFHRWNNYMMDWKNQFNDYTSKKESCVGL

SEQ ID NO: 91 - DNA, 1722 bp, Artificial Sequence
  CDS (1)...(1722): synthetic butyrylcholinesterase variant
gaagatgacatcataattgcaacaaagaatggaaaagtcagagggatgaacttgacagtttttggtggcacggtaacagcctttcttggaattccctatgcacagccacctcttggtagacttcgattcaaaaagccacagtctctgaccaagtggtctgatatttggaatgccacaaaatatgcaaattcttgctgtcagaacatagatcaaagttttccaggcttccatggatcagagatgtggaacccaaacactgacctcagtgaagactgtttatatctaaatgtatggattccagcacctaaaccaaaaaatgccactgtattgatatggatttatggtggtggttttcaaactggaacatcatctttacatgtttatgatggcaagtttctggctcgggttgaaagagttattgtagtgtcaatgaactatagggtgggtgccctaggattcttagctttgccaggaaatcctgaggctccagggaacatgggtttatttgatcaacagttggctcttcagtgggttcaaaaaaatatagcagcctttggtggaaatcctaaaagtgtaactctctttggagaaagtgcaggagcagcttcagttagcctgcatttgctttctcctggaagccattcattgttcaccagagccattctgcaaagtggttccgckaatgctccttgggcggtaacatctctttatgaagctaggaacagaacgttgaacttagctaaattgactggttgctctagagagaatgagactgaaataatcaagtgtcttagaaataaagatccccaagaaattcttctgaatgaagcatttgttgtcccctatgggactcctttgtcagtaaactttggtccgaccgtggatggtgattttctcactgacatgccagacatattacttgaacttggacaatttaaaaaaacccagattttggtgggtgttaataaagatgaagggacagcttttttatcttatggtgctcctggcttcagcaaagataacaatagtatcataactagaaaagaatttcaggaaggtttaaaaatattttttccaggagtgagtgagtttggaaaggaatccatcctttttcattacacagactgggtagatgatcagagacctgaaaactaccgtgaggccttgggtgatgttgttggggattataatttcatatgccctgccttggagttcaccaagaagttctcagaatggggaaataatgcctttttctactattttgaacaccgatcctccaaacttccgtggccagaatggatgggagtgatgcatggctatgaaattgaatttgtctttggtttacctctggaaagaagagataattacacaaaagccgaggaaattttgagtagatccatagtgaaacggtgggcaaattttgcaaaatatgggaatccaaatgagactcagaacaatagcacaagctggcctgtcttcaaaagcactgaacaaaaatatctaaccttgaatacagagtcaacaagaataatgacgaaactacgtgctcaacaatgtcgattctggacatcattttttccaaaagtcttggaaatgacaggaaatattgatgaagcagaatgggagtggaaagcaggattccatcgctggaacaattacatgatggactggaaaaatcaatttaacgattacactagcaagaaagaaagttgtgtgggtctc

SEQ ID NO: 92 - protein, 573 aa, Artificial Sequence
  synthetic butyrylcholinesterase variant
  VARIANT (1)...(573): Xaa = Ala
DDIIIATKNGKVRGMNLTVFGGTVTAFLGIPYAQPPLGRLRFKKPQSLTKWSDIWNATKYANSCCQNIDQSFPGFHGSEMWNPNTDLSEDCLYLNVWIPAPKPKNATVLIWIYGGGFQTGTSSLHVYDGKFLARVERVIVVSMNYRVGALGFLALPGNPEAPGNMGLFDQQLALQWVQKNIAAFGGNPKSVTLFGESAGAASVSLHLLSPGSHSLFTRAILQSGSXNAPWAVTSLYEARNRTLNLAKLTGCSRENETEIIKCLRNKDPQEILLNEAFVVPYGTPLSVNFGPTVDGDFLTDMPDILLELGQFKKTQILVGVNKDEGTAFLSYGAPGFSKDNNSIITRKEFQEGLKIFFPGVSEFGKESILFHYTDWVDDQRPENYREALGDVVGDYNFICPALEFTKKFSEWGNNAFFYYFEHRSSKLPWPEWMGVMHGYEIEFVFGLPLERRDNYTKAEEILSRSIVKRWANFAKYGNPNETQNNSTSWPVFKSTEQKYLTLNTESTRIMTKLRAQQCRFWTSFFPKVLEMTGNIDEAEWEWKAGFHRWNNYMMDWKNQFNDYTSKKESCVGL

SEQ ID NO: 93 - DNA, 1722 bp, Artificial Sequence
  CDS (1)...(1722): synthetic butyrylcholinesterase variant
gaagatgacatcataattgcaacaaagaatggaaaagtcagagggatgaacttgacagtttttggtggcacggtaacagcctttcttggaattccctatgcacagccacctcttggtagacttcgattcaaaaagccacagtctctgaccaagtggtctgatatttggaatgccacaaaatatgcaaattcttgctgtcagaacatagatcaaagttttccaggcttccatggatcagagatgtggaacccaaacactgacctcagtgaagactgtttatatctaaatgtatggattccagcacctaaaccaaaaaatgccactgtattgatatggatttatggtggtggttttcaaactggaacatcatctttacatgtttatgatggcaagtttctggctcgggttgaaagagttattgtagtgtcaatgaactatagggtgggtgccctaggattcttagctttgccaggaaatcctgaggctccagggaacatgggtttatttgatcaacagttggctcttcagtgggttcaaaaaaatatagcagcctttggtggaaatcctaaaagtgtaactctctttggagaaagtgcaggagcagcttcagttagcctgcatttgctttctcctggaagccattcattgttcaccagagccattctgcaaagtggttccgckaatgctccttgggcggtaacatctctttatgaagctaggaacagaacgttgaacttagctaaattgactggttgctctagagagaatgagactgaaataatcaagtgtcttagaaataaagatccccaagaaattcttctgaatgaagcatttgttgtcccctatgggactcctttgtcagtaaactttggtccgaccgtggatggtgattttctcactgacatgccagacatattacttgaacttggacaatttaaaaaaacccagattttggtgggtgttaataaagatgaagggacagcttttttaacttatggtgctcctggcttcagcaaagataacaatagtatcataactagaaaagaatttcaggaaggtttaaaaatattttttccaggagtgagtgagtttggaaaggaatccatcctttttcattacacagactgggtagatgatcagagacctgaaaactaccgtgaggccttgggtgatgttgttggggattataatttcatatgccctgccttggagttcaccaagaagttctcagaatggggaaataatgcctttttctactattttgaacaccgatcctccaaacttccgtggccagaatggatgggagtgatgcatggctatgaaattgaatttgtctttggtttacctctggaaagaagagataattacacaaaagccgaggaaattttgagtagatccatagtgaaacggtgggcaaattttgcaaaatatgggaatccaaatgagactcagaacaatagcacaagctggcctgtcttcaaaagcactgaacaaaaatatctaaccttgaatacagagtcaacaagaataatgacgaaactacgtgctcaacaatgtcgattctggacatcattttttccaaaagtcttggaaatgacaggaaatattgatgaagcagaatgggagtggaaagcaggattccatcgctggaacaattacatgatggactggaaaaatcaatttaacgattacactagcaagaaagaaagttgtgtgggtctc

SEQ ID NO: 94 - protein, 574 aa, Artificial Sequence
  synthetic butyrylcholinesterase variant
  VARIANT 227: Xaa = Ala
EDDIIIATKNGKVRGMNLTVFGGTVTAFLGIPYAQPPLGRLRFKKPQSLTKWSDIWNATKYANSCCQNIDQSFPGFHGSEMWNPNTDLSEDCLYLNVWIPAPKPKNATVLIWIYGGGFQTGTSSLHVYDGKFLARVERVIVVSMNYRVGALGFLALPGNPEAPGNMGLFDQQLALQWVQKNIAAFGGNPKSVTLFGESAGAASVSLHLLSPGSHSLFTRAILQSGSXNAPWAVTSLYEARNRTLNLAKLTGCSRENETEIIKCLRNKDPQEILLNEAFVVPYGTPLSVNFGPTVDGDFLTDMPDILLELGQFKKTQILVGVNKDEGTAFLTYGAPGFSKDNNSIITRKEFQEGLKIFFPGVSEFGKESILFHYTDWVDDQRPENYREALGDVVGDYNFICPALEFTKKFSEWGNNAFFYYFEHRSSKLPWPEWMGVMHGYEIEFVFGLPLERRDNYTKAEEILSRSIVKRWANFAKYGNPNETQNNSTSWPVFKSTEQKYLTLNTESTRIMTKLRAQQCRFWTSFFPKVLEMTGNIDEAEWEWKAGFHRWNNYMMDWKNQFNDYTSKKESCVGL

SEQ ID NO: 95 - DNA, 1722 bp, Artificial Sequence
  CDS (1)...(1722): synthetic butyrylcholinesterase variant
gaagatgacatcataattgcaacaaagaatggaaaagtcagagggatgaacttgacagtttttggtggcacggtaacagcctttcttggaattccctatgcacagccacctcttggtagacttcgattcaaaaagccacagtctctgaccaagtggtctgatatttggaatgccacaaaatatgcaaattcttgctgtcagaacatagatcaaagttttccaggcttccatggatcagagatgtggaacccaaacactgacctcagtgaagactgtttatatctaaatgtatggattccagcacctaaaccaaaaaatgccactgtattgatatggatttatggtggtggttttcaaactggaacatcatctttacatgtttatgatggcaagtttctggctcgggttgaaagagttattgtagtgtcaatgaactatagggtgggtgccctaggattcttagctttgccaggaaatcctgaggctccagggaacatgggtttatttgatcaacagttggctcttcagtgggttcaaaaaaatatagcagcctttggtggaaatcctaaaagtgtaactctctttggagaaagtgcaggagcagcttcagttagcctgcatttgctttctcctggaagccattcattgttcaccagagccattctgcaaagtggttccgckaatgctccttgggcggtaacatctctttatgaagctaggaacagaacgttgaacttagctaaattgactggttgctctagagagaatgagactgaaataatcaagtgtcttagaaataaagatccccaagaaattcttctgaatgaagcatttgttgtcccctatgggactcctttgtcagtaaactttggtccgaccgtggatggtgattttctcactgacatgccagacatattacttgaacttggacaatttaaaaaaacccagattttggtgggtgttaataaagatgaagggacagcttttttagtcgcgggtgctcctggcttcagcaaagataacaatagtatcataactagaaaagaatttcaggaaggtttaaaaatattttttccaggagtgagtgagtttggaaaggaatccatcctttttcattacacagactgggtagatgatcagagacctgaaaactaccgtgaggccttgggtgatgttgttggggattataatttcatatgccctgccttggagttcaccaagaagttctcagaatggggaaataatgcctttttctactattttgaacaccgatcctccaaacttccgtggccagaatggatgggagtgatgcatggctatgaaattgaatttgtctttggtttacctctggaaagaagagataattacacaaaagccgaggaaattttgagtagatccatagtgaaacggtgggcaaattttgcaaaatatgggaatccaaatgagactcagaacaatagcacaagctggcctgtcttcaaaagcactgaacaaaaatatctaaccttgaatacagagtcaacaagaataatgacgaaactacgtgctcaacaatgtcgattctggacatcattttttccaaaagtcttggaaatgacaggaaatattgatgaagcagaatgggagtggaaagcaggattccatcgctggaacaattacatgatggactggaaaaatcaatttaacgattacactagcaagaaagaaagttgtgtgggtctc

SEQ ID NO: 96 - protein, 574 aa, Artificial Sequence
  synthetic butyrylcholinesterase variant
  VARIANT 227: Xaa = Ala
EDDIIIATKNGKVRGMNLTVFGGTVTAFLGIPYAQPPLGRLRFKKPQSLTKWSDIWNATKYANSCCQNIDQSFPGFHGSEMWNPNTDLSEDCLYLNVWIPAPKPKNATVLIWIYGGGFQTGTSSLHVYDGKFLARVERVIVVSMNYRVGALGFLALPGNPEAPGNMGLFDQQLALQWVQKNIAAFGGNPKSVTLFGESAGAASVSLHLLSPGSHSLFTRAILQSGSXNAPWAVTSLYEARNRTLNLAKLTGCSRENETEIIKCLRNKDPQEILLNEAFVVPYGTPLSVNFGPTVDGDFLTDMPDILLELGQFKKTQILVGVNKDEGTAFLVAGAPGFSKDNNSIITRKEFQEGLKIFFPGVSEFGKESILFHYTDWVDDQRPENYREALGDVVGDYNFICPALEFTKKFSEWGNNAFFYYFEHRSSKLPWPEWMGVMHGYEIEFVFGLPLERRDNYTKAEEILSRSIVKRWANFAKYGNPNETQNNSTSWPVFKSTEQKYLTLNTESTRIMTKLRAQQCRFWTSFFPKVLEMTGNIDEAEWEWKAGFHRWNNYMMDWKNQFNDYTSKKESCVGL

SEQ ID NO: 97 - DNA, 1722 bp, Artificial Sequence
  CDS (1)...(1722): synthetic butyrylcholinesterase variant
gaagatgacatcataattgcaacaaagaatggaaaagtcagagggatgaacttgacagtttttggtggcacggtaacagcctttcttggaattccctatgcacagccacctcttggtagacttcgattcaaaaagccacagtctctgaccaagtggtctgatatttggaatgccacaaaatatgcaaattcttgctgtcagaacatagatcaaagttttccaggcttccatggatcagagatgtggaacccaaacactgacctcagtgaagactgtttatatctaaatgtatggattccagcacctaaaccaaaaaatgccactgtattgatatggatttatggtggtggttttcaaactggaacatcatctttacatgtttatgatggcaagtttctggctcgggttgaaagagttattgtagtgtcaatgaactatagggtgggtgccctaggattcttagctttgccaggaaatcctgaggctccagggaacatgggtttatttgatcaacagttggctcttcagtgggttcaaaaaaatatagcagcctttggtggaaatcctaaaagtgtaactctctttggagaaagtgcaggagcagcttcagttagcctgcatttgctttctcctggaagccattcattgttcaccagagccattctgcaaagtggttccgckaatgctccttgggcggtaacatctctttatgaagctaggaacagaacgttgaacttagctaaattgactggttgctctagagagaatgagactgaaataatcaagtgtcttagaaataaagatccccaagaaattcttctgaatgaagcatttgttgtcccctatgggactcctttgtcagtaaactttggtccgaccgtggatggtgattttctcactgacatgccagacatattacttgaacttggacaatttaaaaaaacccagattttggtgggtgttaataaagatgaagggacagcttttttagtcgggggtgctcctggcttcagcaaagataacaatagtatcataactagaaaagaatttcaggaaggtttaaaaatattttttccaggagtgagtgagtttggaaaggaatccatcctttttcattacacagactgggtagatgatcagagacctgaaaactaccgtgaggccttgggtgatgttgttggggattataatttcatatgccctgccttggagttcaccaagaagttctcagaatggggaaataatgcctttttctactattttgaacaccgatcctccaaacttccgtggccagaatggatgggagtgatgcatggctatgaaattgaatttgtctttggtttacctctggaaagaagagataattacacaaaagccgaggaaattttgagtagatccatagtgaaacggtgggcaaattttgcaaaatatgggaatccaaatgagactcagaacaatagcacaagctggcctgtcttcaaaagcactgaacaaaaatatctaaccttgaatacagagtcaacaagaataatgacgaaactacgtgctcaacaatgtcgattctggacatcattttttccaaaagtcttggaaatgacaggaaatattgatgaagcagaatgggagtggaaagcaggattccatcgctggaacaattacatgatggactggaaaaatcaatttaacgattacactagcaagaaagaaagttgtgtgggtctc

SEQ ID NO: 98 - protein, 574 aa, Artificial Sequence
  synthetic butyrylcholinesterase variant
  VARIANT 227: Xaa = Ala
EDDIIIATKNGKVRGMNLTVFGGTVTAFLGIPYAQPPLGRLRFKKPQSLTKWSDIWNATKYANSCCQNIDQSFPGFHGSEMWNPNTDLSEDCLYLNVWIPAPKPKNATVLIWIYGGGFQTGTSSLHVYDGKFLARVERVIVVSMNYRVGALGFLALPGNPEAPGNMGLFDQQLALQWVQKNIAAFGGNPKSVTLFGESAGAASVSLHLLSPGSHSLFTRAILQSGSXNAPWAVTSLYEARNRTLNLAKLTGCSRENETEIIKCLRNKDPQEILLNEAFVVPYGTPLSVNFGPTVDGDFLTDMPDILLELGQFKKTQILVGVNKDEGTAFLVGGAPGFSKDNNSIITRKEFQEGLKIFFPGVSEFGKESILFHYTDWVDDQRPENYREALGDVVGDYNFICPALEFTKKFSEWGNNAFFYYFEHRSSKLPWPEWMGVMHGYEIEFVFGLPLERRDNYTKAEEILSRSIVKRWANFAKYGNPNETQNNSTSWPVFKSTEQKYLTLNTESTRIMTKLRAQQCRFWTSFFPKVLEMTGNIDEAEWEWKAGFHRWNNYMMDWKNQFNDYTSKKESCVGL

SEQ ID NO: 99 - DNA, 1722 bp, Artificial Sequence
  CDS (1)...(1722): synthetic butyrylcholinesterase variant
gaagatgacatcataattgcaacaaagaatggaaaagtcagagggatgaacttgacagtttttggtggcacggtaacagcctttcttggaattccctatgcacagccacctcttggtagacttcgattcaaaaagccacagtctctgaccaagtggtctgatatttggaatgccacaaaatatgcaaattcttgctgtcagaacatagatcaaagttttccaggcttccatggatcagagatgtggaacccaaacactgacctcagtgaagactgtttatatctaaatgtatggattccagcacctaaaccaaaaaatgccactgtattgatatggatttatggtggtggttttcaaactggaacatcatctttacatgtttatgatggcaagtttctggctcgggttgaaagagttattgtagtgtcaatgaactatagggtgggtgccctaggattcttagctttgccaggaaatcctgaggctccagggaacatgggtttatttgatcaacagttggctcttcagtgggttcaaaaaaatatagcagcctttggtggaaatcctaaaagtgtaactctctttggagaaagtgcaggagcagcttcagttagcctgcatttgctttctcctggaagccattcattgttcaccagagccattctgcaaagtggttccgckaatgctccttgggcggtaacatctctttatgaagctaggaacagaacgttgaacttagctaaattgactggttgctctagagagaatgagactgaaataatcaagtgtcttagaaataaagatccccaagaaattcttctgaatgaagcatttgttgtcccctatgggactcctttgtcagtaaactttggtccgaccgtggatggtgattttctcactgacatgccagacatattacttgaacttggacaatttaaaaaaacccagattttggtgggtgttaataaagatgaagggacagcttttttagtcttgggtgctcctggcttcagcaaagataacaatagtatcataactagaaaagaatttcaggaaggtttaaaaatattttttccaggagtgagtgagtttggaaaggaatccatcctttttcattacacagactgggtagatgatcagagacctgaaaactaccgtgaggccttgggtgatgttgttggggattataatttcatatgccctgccttggagttcaccaagaagttctcagaatggggaaataatgcctttttctactattttgaacaccgatcctccaaacttccgtggccagaatggatgggagtgatgcatggctatgaaattgaatttgtctttggtttacctctggaaagaagagataattacacaaaagccgaggaaattttgagtagatccatagtgaaacggtgggcaaattttgcaaaatatgggaatccaaatgagactcagaacaatagcacaagctggcctgtcttcaaaagcactgaacaaaaatatctaaccttgaatacagagtcaacaagaataatgacgaaactacgtgctcaacaatgtcgattctggacatcattttttccaaaagtcttggaaatgacaggaaatattgatgaagcagaatgggagtggaaagcaggattccatcgctggaacaattacatgatggactggaaaaatcaatttaacgattacactagcaagaaagaaagttgtgtgggtctc

SEQ ID NO: 100 - protein, 574 aa, Artificial Sequence
  synthetic butyrylcholinesterase variant
  VARIANT 227: Xaa = Ala
EDDIIIATKNGKVRGMNLTVFGGTVTAFLGIPYAQPPLGRLRFKKPQSLTKWSDIWNATKYANSCCQNIDQSFPGFHGSEMWNPNTDLSEDCLYLNVWIPAPKPKNATVLIWIYGGGFQTGTSSLHVYDGKFLARVERVIVVSMNYRVGALGFLALPGNPEAPGNMGLFDQQLALQWVQKNIAAFGGNPKSVTLFGESAGAASVSLHLLSPGSHSLFTRAILQSGSXNAPWAVTSLYEARNRTLNLAKLTGCSRENETEIIKCLRNKDPQEILLNEAFVVPYGTPLSVNFGPTVDGDFLTDMPDILLELGQFKKTQILVGVNKDEGTAFLVLGAPGFSKDNNSIITRKEFQEGLKIFFPGVSEFGKESILFHYTDWVDDQRPENYREALGDVVGDYNFICPALEFTKKFSEWGNNAFFYYFEHRSSKLPWPEWMGVMHGYEIEFVFGLPLERRDNYTKAEEILSRSIVKRWANFAKYGNPNETQNNSTSWPVFKSTEQKYLTLNTESTRIMTKLRAQQCRFWTSFFPKVLEMTGNIDEAEWEWKAGFHRWNNYMMDWKNQFNDYTSKKESCVGL

SEQ ID NO: 101 - DNA, 1722 bp, Artificial Sequence
  CDS (1)...(1722): synthetic butyrylcholinesterase variant
gaagatgacatcataattgcaacaaagaatggaaaagtcagagggatgaacttgacagtttttggtggcacggtaacagcctttcttggaattccctatgcacagccacctcttggtagacttcgattcaaaaagccacagtctctgaccaagtggtctgatatttggaatgccacaaaatatgcaaattcttgctgtcagaacatagatcaaagttttccaggcttccatggatcagagatgtggaacccaaacactgacctcagtgaagactgtttatatctaaatgtatggattccagcacctaaaccaaaaaatgccactgtattgatatggatttatggtggtggttttcaaactggaacatcatctttacatgtttatgatggcaagtttctggctcgggttgaaagagttattgtagtgtcaatgaactatagggtgggtgccctaggattcttagctttgccaggaaatcctgaggctccagggaacatgggtttatttgatcaacagttggctcttcagtgggttcaaaaaaatatagcagcctttggtggaaatcctaaaagtgtaactctctttggagaaagtgcaggagcagcttcagttagcctgcatttgctttctcctggaagccattcattgttcaccagagccattctgcaaagtggttccgckaatgctccttgggcggtaacatctctttatgaagctaggaacagaacgttgaacttagctaaattgactggttgctctagagagaatgagactgaaataatcaagtgtcttagaaataaagatccccaagaaattcttctgaatgaagcatttgttgtcccctatgggactcctttgtcagtaaactttggtccgaccgtggatggtgattttctcactgacatgccagacatattacttgaacttggacaatttaaaaaaacccagattttggtgggtgttaataaagatgaagggacagcttttttagtctctggtgctcctggcttcagcaaagataacaatagtatcataactagaaaagaatttcaggaaggtttaaaaatattttttccaggagtgagtgagtttggaaaggaatccatcctttttcattacacagactgggtagatgatcagagacctgaaaactaccgtgaggccttgggtgatgttgttggggattataatttcatatgccctgccttggagttcaccaagaagttctcagaatggggaaataatgcctttttctactattttgaacaccgatcctccaaacttccgtggccagaatggatgggagtgatgcatggctatgaaattgaatttgtctttggtttacctctggaaagaagagataattacacaaaagccgaggaaattttgagtagatccatagtgaaacggtgggcaaattttgcaaaatatgggaatccaaatgagactcagaacaatagcacaagctggcctgtcttcaaaagcactgaacaaaaatatctaaccttgaatacagagtcaacaagaataatgacgaaactacgtgctcaacaatgtcgattctggacatcattttttccaaaagtcttggaaatgacaggaaatattgatgaagcagaatgggagtggaaagcaggattccatcgctggaacaattacatgatggactggaaaaatcaatttaacgattacactagcaagaaagaaagttgtgtgggtctc

SEQ ID NO: 102 - protein, 574 aa, Artificial Sequence
  synthetic butyrylcholinesterase variant
  VARIANT 227: Xaa = Ala
EDDIIIATKNGKVRGMNLTVFGGTVTAFLGIPYAQPPLGRLRFKKPQSLTKWSDIWNATKYANSCCQNIDQSFPGFHGSEMWNPNTDLSEDCLYLNVWIPAPKPKNATVLIWIYGGGFQTGTSSLHVYDGKFLARVERVIVVSMNYRVGALGFLALPGNPEAPGNMGLFDQQLALQWVQKNIAAFGGNPKSVTLFGESAGAASVSLHLLSPGSHSLFTRAILQSGSXNAPWAVTSLYEARNRTLNLAKLTGCSRENETEIIKCLRNKDPQEILLNEAFVVPYGTPLSVNFGPTVDGDFLTDMPDILLELGQFKKTQILVGVNKDEGTAFLVSGAPGFSKDNNSIITRKEFQEGLKIFFPGVSEFGKESILFHYTDWVDDQRPENYREALGDVVGDYNFICPALEFTKKFSEWGNNAFFYYFEHRSSKLPWPEWMGVMHGYEIEFVFGLPLERRDNYTKAEEILSRSIVKRWANFAKYGNPNETQNNSTSWPVFKSTEQKYLTLNTESTRIMTKLRAQQCRFWTSFFPKVLEMTGNIDEAEWEWKAGFHRWNNYMMDWKNQFNDYTSKKESCVGL

SEQ ID NO: 103 - DNA, 1722 bp, Artificial Sequence
  CDS (1)...(1722): synthetic butyrylcholinesterase variant
gaagatgacatcataattgcaacaaagaatggaaaagtcagagggatgaacttgacagtttttggtggcacggtaacagcctttcttggaattccctatgcacagccacctcttggtagacttcgattcaaaaagccacagtctctgaccaagtggtctgatatttggaatgccacaaaatatgcaaattcttgctgtcagaacatagatcaaagttttccaggcttccatggatcagagatgtggaacccaaacactgacctcagtgaagactgtttatatctaaatgtatggattccagcacctaaaccaaaaaatgccactgtattgatatggatttatggtggtggttttcaaactggaacatcatctttacatgtttatgatggcaagtttctggctcgggttgaaagagttattgtagtgtcaatgaactatagggtgggtgccctaggattcttagctttgccaggaaatcctgaggctccagggaacatgggtttatttgatcaacagttggctcttcagtgggttcaaaaaaatatagcagcctttggtggaaatcctaaaagtgtaactctctttggagaaagtgcaggagcagcttcagttagcctgcatttgctttctcctggaagccattcattgttcaccagagccattctgcaaagtggttccgckaatgctccttgggcggtaacatctctttatgaagctaggaacagaacgttgaacttagctaaattgactggttgctctagagagaatgagactgaaataatcaagtgtcttagaaataaagatccccaagaaattcttctgaatgaagcatttgttgtcccctatgggactcctttgtcagtaaactttggtccgaccgtggatggtgattttctcactgacatgccagacatattacttgaacttggacaatttaaaaaaacccagattttggtgggtgttaataaagatgaagggacagcttttttagtctggggtgctcctggcttcagcaaagataacaatagtatcataactagaaaagaatttcaggaaggtttaaaaatattttttccaggagtgagtgagtttggaaaggaatccatcctttttcattacacagactgggtagatgatcagagacctgaaaactaccgtgaggccttgggtgatgttgttggggattataatttcatatgccctgccttggagttcaccaagaagttctcagaatggggaaataatgcctttttctactattttgaacaccgatcctccaaacttccgtggccagaatggatgggagtgatgcatggctatgaaattgaatttgtctttggtttacctctggaaagaagagataattacacaaaagccgaggaaattttgagtagatccatagtgaaacggtgggcaaattttgcaaaatatgggaatccaaatgagactcagaacaatagcacaagctggcctgtcttcaaaagcactgaacaaaaatatctaaccttgaatacagagtcaacaagaataatgacgaaactacgtgctcaacaatgtcgattctggacatcattttttccaaaagtcttggaaatgacaggaaatattgatgaagcagaatgggagtggaaagcaggattccatcgctggaacaattacatgatggactggaaaaatcaatttaacgattacactagcaagaaagaaagttgtgtgggtctc

SEQ ID NO: 104 - protein, 574 aa, Artificial Sequence
  synthetic butyrylcholinesterase variant
  VARIANT 227: Xaa = Ala
EDDIIIATKNGKVRGMNLTVFGGTVTAFLGIPYAQPPLGRLRFKKPQSLTKWSDIWNATKYANSCCQNIDQSFPGFHGSEMWNPNTDLSEDCLYLNVWIPAPKPKNATVLIWIYGGGFQTGTSSLHVYDGKFLARVERVIVVSMNYRVGALGFLALPGNPEAPGNMGLFDQQLALQWVQKNIAAFGGNPKSVTLFGESAGAASVSLHLLSPGSHSLFTRAILQSGSXNAPWAVTSLYEARNRTLNLAKLTGCSRENETEIIKCLRNKDPQEILLNEAFVVPYGTPLSVNFGPTVDGDFLTDMPDILLELGQFKKTQILVGVNKDEGTAFLVWGAPGFSKDNNSIITRKEFQEGLKIFFPGVSEFGKESILFHYTDWVDDQRPENYREALGDVVGDYNFICPALEFTKKFSEWGNNAFFYYFEHRSSKLPWPEWMGVMHGYEIEFVFGLPLERRDNYTKAEEILSRSIVKRWANFAKYGNPNETQNNSTSWPVFKSTEQKYLTLNTESTRIMTKLRAQQCRFWTSFFPKVLEMTGNIDEAEWEWKAGFHRWNNYMMDWKNQFNDYTSKKESCVGL

SEQ ID NO: 105 - DNA, 1722 bp, Artificial Sequence
  CDS (1)...(1722): synthetic butyrylcholinesterase variant
gaagatgacatcataattgcaacaaagaatggaaaagtcagagggatgaacttgacagtttttggtggcacggtaacagcctttcttggaattccctatgcacagccacctcttggtagacttcgattcaaaaagccacagtctctgaccaagtggtctgatatttggaatgccacaaaatatgcaaattcttgctgtcagaacatagatcaaagttttccaggcttccatggatcagagatgtggaacccaaacactgacctcagtgaagactgtttatatctaaatgtatggattccagcacctaaaccaaaaaatgccactgtattgatatggatttatggtggtggttttcaaactggaacatcatctttacatgtttatgatggcaagtttctggctcgggttgaaagagttattgtagtgtcaatgaactatagggtgggtgccctaggattcttagctttgccaggaaatcctgaggctccagggaacatgggtttatttgatcaacagttggctcttcagtgggttcaaaaaaatatagcagcctttggtggaaatcctaaaagtgtaactctctttggagaaagtgcaggagcagcttcagttagcctgcatttgctttctcctggaagccattcattgttcaccagagccattctgcaaagtggttccgckaatgctccttgggcggtaacatctctttatgaagctaggaacagaacgttgaacttagctaaattgactggttgctctagagagaatgagactgaaataatcaagtgtcttagaaataaagatccccaagaaattcttctgaatgaagcatttgttgtcccctatgggactcctttgtcagtaaactttggtccgaccgtggatggtgattttctcactgacatgccagacatattacttgaacttggacaatttaaaaaaacccagattttggtgggtgttaataaagatgaagggacagcttttttagtctatggtgctcctggcttcagcaaagataacaatagtatcataactagaaaagaatttcaggaaggtttaaaaatattttttccaggagtgagtgagtttggaaaggaatccatcctttttcattacacagactgggtagatgatcagagacctgaaaactaccgtgaggccttgggtgatgttgttggggattataatttcatatgccctgccttggagttcaccaagaagttctcagaatggggaaataatgcctttttctactattttgaacaccgatcctccaaacttaagtggccagaatggatgggagtgatgcatggctatgaaattgaatttgtctttggtttacctctggaaagaagagataattacacaaaagccgaggaaattttgagtagatccatagtgaaacggtgggcaaattttgcaaaatatgggaatccaaatgagactcagaacaatagcacaagctggcctgtcttcaaaagcactgaacaaaaatatctaaccttgaatacagagtcaacaagaataatgacgaaactacgtgctcaacaatgtcgattctggacatcattttttccaaaagtcttggaaatgacaggaaatattgatgaagcagaatgggagtggaaagcaggattccatcgctggaacaattacatgatggactggaaaaatcaatttaacgattacactagcaagaaagaaagttgtgtgggtctc

SEQ ID NO: 106 - protein, 574 aa, Artificial Sequence
  synthetic butyrylcholinesterase variant
  VARIANT 227: Xaa = Ala
EDDIIIATKNGKVRGMNLTVFGGTVTAFLGIPYAQPPLGRLRFKKPQSLTKWSDIWNATKYANSCCQNIDQSFPGFHGSEMWNPNTDLSEDCLYLNVWIPAPKPKNATVLIWIYGGGFQTGTSSLHVYDGKFLARVERVIVVSMNYRVGALGFLALPGNPEAPGNMGLFDQQLALQWVQKNIAAFGGNPKSVTLFGESAGAASVSLHLLSPGSHSLFTRAILQSGSXNAPWAVTSLYEARNRTLNLAKLTGCSRENETEIIKCLRNKDPQEILLNEAFVVPYGTPLSVNFGPTVDGDFLTDMPDILLELGQFKKTQILVGVNKDEGTAFLVYGAPGFSKDNNSIITRKEFQEGLKIFFPGVSEFGKESILFHYTDWVDDQRPENYREALGDVVGDYNFICPALEFTKKFSEWGNNAFFYYFEHRSSKLKWPEWMGVMHGYEIEFVFGLPLERRDNYTKAEEILSRSIVKRWANFAKYGNPNETQNNSTSWPVFKSTEQKYLTLNTESTRIMTKLRAQQCRFWTSFFPKVLEMTGNIDEAEWEWKAGFHRWNNYMMDWKNQFNDYTSKKESCVGL

SEQ ID NO: 107 - DNA, 1722 bp, Artificial Sequence
  CDS (1)...(1722): synthetic butyrylcholinesterase variant
gaagatgacatcataattgcaacaaagaatggaaaagtcagagggatgaacttgacagtttttggtggcacggtaacagcctttcttggaattccctatgcacagccacctcttggtagacttcgattcaaaaagccacagtctctgaccaagtggtctgatatttggaatgccacaaaatatgcaaattcttgctgtcagaacatagatcaaagttttccaggcttccatggatcagagatgtggaacccaaacactgacctcagtgaagactgtttatatctaaatgtatggattccagcacctaaaccaaaaaatgccactgtattgatatggatttatggtggtggttttcaaactggaacatcatctttacatgtttatgatggcaagtttctggctcgggttgaaagagttattgtagtgtcaatgaactatagggtgggtgccctaggattcttagctttgccaggaaatcctgaggctccagggaacatgggtttatttgatcaacagttggctcttcagtgggttcaaaaaaatatagcagcctttggtggaaatcctaaaagtgtaactctctttggagaaagtgcaggagcagcttcagttagcctgcatttgctttctcctggaagccattcattgttcaccagagccattctgcaaagtggttccgckaatgctccttgggcggtaacatctctttatgaagctaggaacagaacgttgaacttagctaaattgactggttgctctagagagaatgagactgaaataatcaagtgtcttagaaataaagatccccaagaaattcttctgaatgaagcatttgttgtcccctatgggactcctttgtcagtaaactttggtccgaccgtggatggtgattttctcactgacatgccagacatattacttgaacttggacaatttaaaaaaacccagattttggtgggtgttaataaagatgaagggacagcttttttagtctatggtgctcctggcttcagcaaagataacaatagtatcataactagaaaagaatttcaggaaggtttaaaaatattttttccaggagtgagtgagtttggaaaggaatccatcctttttcattacacagactgggtagatgatcagagacctgaaaactaccgtgaggccttgggtgatgttgttggggattataatttcatatgccctgccttggagttcaccaagaagttctcagaatggggaaataatgcctttttctactattttgaacaccgatcctccaaacttttgtggccagaatggatgggagtgatgcatggctatgaaattgaatttgtctttggtttacctctggaaagaagagataattacacaaaagccgaggaaattttgagtagatccatagtgaaacggtgggcaaattttgcaaaatatgggaatccaaatgagactcagaacaatagcacaagctggcctgtcttcaaaagcactgaacaaaaatatctaaccttgaatacagagtcaacaagaataatgacgaaactacgtgctcaacaatgtcgattctggacatcattttttccaaaagtcttggaaatgacaggaaatattgatgaagcagaatgggagtggaaagcaggattccatcgctggaacaattacatgatggactggaaaaatcaatttaacgattacactagcaagaaagaaagttgtgtgggtctc

SEQ ID NO: 108 - protein, 574 aa, Artificial Sequence
  synthetic butyrylcholinesterase variant
  VARIANT 227: Xaa = Ala
EDDIIIATKNGKVRGMNLTVFGGTVTAFLGIPYAQPPLGRLRFKKPQSLTKWSDIWNATKYANSCCQNIDQSFPGFHGSEMWNPNTDLSEDCLYLNVWIPAPKPKNATVLIWIYGGGFQTGTSSLHVYDGKFLARVERVIVVSMNYRVGALGFLALPGNPEAPGNMGLFDQQLALQWVQKNIAAFGGNPKSVTLFGESAGAASVSLHLLSPGSHSLFTRAILQSGSXNAPWAVTSLYEARNRTLNLAKLTGCSRENETEIIKCLRNKDPQEILLNEAFVVPYGTPLSVNFGPTVDGDFLTDMPDILLELGQFKKTQILVGVNKDEGTAFLVYGAPGFSKDNNSIITRKEFQEGLKIFFPGVSEFGKESILFHYTDWVDDQRPENYREALGDVVGDYNFICPALEFTKKFSEWGNNAFFYYFEHRSSKLLWPEWMGVMHGYEIEFVFGLPLERRDNYTKAEEILSRSIVKRWANFAKYGNPNETQNNSTSWPVFKSTEQKYLTLNTESTRIMTKLRAQQCRFWTSFFPKVLEMTGNIDEAEWEWKAGFHRWNNYMMDWKNQFNDYTSKKESCVGL

SEQ ID NO: 109 - DNA, 1722 bp, Artificial Sequence
  CDS (1)...(1722): synthetic butyrylcholinesterase variant
gaagatgacatcataattgcaacaaagaatggaaaagtcagagggatgaacttgacagtttttggtggcacggtaacagcctttcttggaattccctatgcacagccacctcttggtagacttcgattcaaaaagccacagtctctgaccaagtggtctgatatttggaatgccacaaaatatgcaaattcttgctgtcagaacatagatcaaagttttccaggcttccatggatcagagatgtggaacccaaacactgacctcagtgaagactgtttatatctaaatgtatggattccagcacctaaaccaaaaaatgccactgtattgatatggatttatggtggtggttttcaaactggaacatcatctttacatgtttatgatggcaagtttctggctcgggttgaaagagttattgtagtgtcaatgaactatagggtgggtgccctaggattcttagctttgccaggaaatcctgaggctccagggaacatgggtttatttgatcaacagttggctcttcagtgggttcaaaaaaatatagcagcctttggtggaaatcctaaaagtgtaactctctttggagaaagtgcaggagcagcttcagttagcctgcatttgctttctcctggaagccattcattgttcaccagagccattctgcaaagtggttccgckaatgctccttgggcggtaacatctctttatgaagctaggaacagaacgttgaacttagctaaattgactggttgctctagagagaatgagactgaaataatcaagtgtcttagaaataaagatccccaagaaattcttctgaatgaagcatttgttgtcccctatgggactcctttgtcagtaaactttggtccgaccgtggatggtgattttctcactgacatgccagacatattacttgaacttggacaatttaaaaaaacccagattttggtgggtgttaataaagatgaagggacagcttttttagtctatggtgctcctggcttcagcaaagataacaatagtatcataactagaaaagaatttcaggaaggtttaaaaatattttttccaggagtgagtgagtttggaaaggaatccatcctttttcattacacagactgggtagatgatcagagacctgaaaactaccgtgaggccttgggtgatgttgttggggattataatttcatatgccctgccttggagttcaccaagaagttctcagaatggggaaataatgcctttttctactattttgaacaccgatcctccaaacttcagtggccagaatggatgggagtgatgcatggctatgaaattgaatttgtctttggtttacctctggaaagaagagataattacacaaaagccgaggaaattttgagtagatccatagtgaaacggtgggcaaattttgcaaaatatgggaatccaaatgagactcagaacaatagcacaagctggcctgtcttcaaaagcactgaacaaaaatatctaaccttgaatacagagtcaacaagaataatgacgaaactacgtgctcaacaatgtcgattctggacatcattttttccaaaagtcttggaaatgacaggaaatattgatgaagcagaatgggagtggaaagcaggattccatcgctggaacaattacatgatggactggaaaaatcaatttaacgattacactagcaagaaagaaagttgtgtgggtctc

SEQ ID NO: 110 - protein, 573 aa, Artificial Sequence
  synthetic butyrylcholinesterase variant
  VARIANT (1)...(573): Xaa = Ala
DDIIIATKNGKVRGMNLTVFGGTVTAFLGIPYAQPPLGRLRFKKPQSLTKWSDIWNATKYANSCCQNIDQSFPGFHGSEMWNPNTDLSEDCLYLNVWIPAPKPKNATVLIWIYGGGFQTGTSSLHVYDGKFLARVERVIVVSMNYRVGALGFLALPGNPEAPGNMGLFDQQLALQWVQKNIAAFGGNPKSVTLFGESAGAASVSLHLLSPGSHSLFTRAILQSGSXNAPWAVTSLYEARNRTLNLAKLTGCSRENETEIIKCLRNKDPQEILLNEAFVVPYGTPLSVNFGPTVDGDFLTDMPDILLELGQFKKTQILVGVNKDEGTAFLVYGAPGFSKDNNSIITRKEFQEGLKIFFPGVSEFGKESILFHYTDWVDDQRPENYREALGDVVGDYNFICPALEFTKKFSEWGNNAFFYYFEHRSSKLQWPEWMGVMHGYEIEFVFGLPLERRDNYTKAEEILSRSIVKRWANFAKYGNPNETQNNSTSWPVFKSTEQKYLTLNTESTRIMTKLRAQQCRFWTSFFPKVLEMTGNIDEAEWEWKAGFHRWNNYMMDWKNQFNDYTSKKESCVGL

SEQ ID NO: 111 - DNA, 1722 bp, Artificial Sequence
  CDS (1)...(1722): synthetic butyrylcholinesterase variant
gaagatgacatcataattgcaacaaagaatggaaaagtcagagggatgaacttgacagtttttggtggcacggtaacagcctttcttggaattccctatgcacagccacctcttggtagacttcgattcaaaaagccacagtctctgaccaagtggtctgatatttggaatgccacaaaatatgcaaattcttgctgtcagaacatagatcaaagttttccaggcttccatggatcagagatgtggaacccaaacactgacctcagtgaagactgtttatatctaaatgtatggattccagcacctaaaccaaaaaatgccactgtattgatatggatttatggtggtggttttcaaactggaacatcatctttacatgtttatgatggcaagtttctggctcgggttgaaagagttattgtagtgtcaatgaactatagggtgggtgccctaggattcttagctttgccaggaaatcctgaggctccagggaacatgggtttatttgatcaacagttggctcttcagtgggttcaaaaaaatatagcagcctttggtggaaatcctaaaagtgtaactctctttggagaaagtgcaggagcagcttcagttagcctgcatttgctttctcctggaagccattcattgttcaccagagccattctgcaaagtggttccgckaatgctccttgggcggtaacatctctttatgaagctaggaacagaacgttgaacttagctaaattgactggttgctctagagagaatgagactgaaataatcaagtgtcttagaaataaagatccccaagaaattcttctgaatgaagcatttgttgtcccctatgggactcctttgtcagtaaactttggtccgaccgtggatggtgattttctcactgacatgccagacatattacttgaacttggacaatttaaaaaaacccagattttggtgggtgttaataaagatgaagggacagcttttttagtctatggtgctcctggcttcagcaaagataacaatagtatcataactagaaaagaatttcaggaaggtttaaaaatattttttccaggagtgagtgagtttggaaaggaatccatcctttttcattacacagactgggtagatgatcagagacctgaaaactaccgtgaggccttgggtgatgttgttggggattataatttcatatgccctgccttggagttcaccaagaagttctcagaatggggaaataatgcctttttctactattttgaacaccgatcctccaaacttaggtggccagaatggatgggagtgatgcatggctatgaaattgaatttgtctttggtttacctctggaaagaagagataattacacaaaagccgaggaaattttgagtagatccatagtgaaacggtgggcaaattttgcaaaatatgggaatccaaatgagactcagaacaatagcacaagctggcctgtcttcaaaagcactgaacaaaaatatctaaccttgaatacagagtcaacaagaataatgacgaaactacgtgctcaacaatgtcgattctggacatcattttttccaaaagtcttggaaatgacaggaaatattgatgaagcagaatgggagtggaaagcaggattccatcgctggaacaattacatgatggactggaaaaatcaatttaacgattacactagcaagaaagaaagttgtgtgggtctc

SEQ ID NO: 112 - protein, 574 aa, Artificial Sequence
  synthetic butyrylcholinesterase variant
  VARIANT 227: Xaa = Ala
EDDIIIATKNGKVRGMNLTVFGGTVTAFLGIPYAQPPLGRLRFKKPQSLTKWSDIWNATKYANSCCQNIDQSFPGFHGSEMWNPNTDLSEDCLYLNVWIPAPKPKNATVLIWIYGGGFQTGTSSLHVYDGKFLARVERVIVVSMNYRVGALGFLALPGNPEAPGNMGLFDQQLALQWVQKNIAAFGGNPKSVTLFGESAGAASVSLHLLSPGSHSLFTRAILQSGSXNAPWAVTSLYEARNRTLNLAKLTGCSRENETEIIKCLRNKDPQEILLNEAFVVPYGTPLSVNFGPTVDGDFLTDMPDILLELGQFKKTQILVGVNKDEGTAFLVYGAPGFSKDNNSIITRKEFQEGLKIFFPGVSEFGKESILFHYTDWVDDQRPENYREALGDVVGDYNFICPALEFTKKFSEWGNNAFFYYFEHRSSKLRWPEWMGVMHGYEIEFVFGLPLERRDNYTKAEEILSRSIVKRWANFAKYGNPNETQNNSTSWPVFKSTEQKYLTLNTESTRIMTKLRAQQCRFWTSFFPKVLEMTGNIDEAEWEWKAGFHRWNNYMMDWKNQFNDYTSKKESCVGL

SEQ ID NO: 113 - DNA, 1722 bp, Artificial Sequence
  CDS (1)...(1722): synthetic butyrylcholinesterase variant
gaagatgacatcataattgcaacaaagaatggaaaagtcagagggatgaacttgacagtttttggtggcacggtaacagcctttcttggaattccctatgcacagccacctcttggtagacttcgattcaaaaagccacagtctctgaccaagtggtctgatatttggaatgccacaaaatatgcaaattcttgctgtcagaacatagatcaaagttttccaggcttccatggatcagagatgtggaacccaaacactgacctcagtgaagactgtttatatctaaatgtatggattccagcacctaaaccaaaaaatgccactgtattgatatggatttatggtggtggttttcaaactggaacatcatctttacatgtttatgatggcaagtttctggctcgggttgaaagagttattgtagtgtcaatgaactatagggtgggtgccctaggattcttagctttgccaggaaatcctgaggctccagggaacatgggtttatttgatcaacagttggctcttcagtgggttcaaaaaaatatagcagcctttggtggaaatcctaaaagtgtaactctctttggagaaagtgcaggagcagcttcagttagcctgcatttgctttctcctggaagccattcattgttcaccagagccattctgcaaagtggttccgckaatgctccttgggcggtaacatctctttatgaagctaggaacagaacgttgaacttagctaaattgactggttgctctagagagaatgagactgaaataatcaagtgtcttagaaataaagatccccaagaaattcttctgaatgaagcatttgttgtcccctatgggactcctttgtcagtaaactttggtccgaccgtggatggtgattttctcactgacatgccagacatattacttgaacttggacaatttaaaaaaacccagattttggtgggtgttaataaagatgaagggacagcttttttagtctatggtgctcctggcttcagcaaagataacaatagtatcataactagaaaagaatttcaggaaggtttaaaaatattttttccaggagtgagtgagtttggaaaggaatccatcctttttcattacacagactgggtagatgatcagagacctgaaaactaccgtgaggccttgggtgatgttgttggggattataatttcatatgccctgccttggagttcaccaagaagttctcagaatggggaaataatgcctttttctactattttgaacaccgatcctccaaactttcgtggccagaatggatgggagtgatgcatggctatgaaattgaatttgtctttggtttacctctggaaagaagagataattacacaaaagccgaggaaattttgagtagatccatagtgaaacggtgggcaaattttgcaaaatatgggaatccaaatgagactcagaacaatagcacaagctggcctgtcttcaaaagcactgaacaaaaatatctaaccttgaatacagagtcaacaagaataatgacgaaactacgtgctcaacaatgtcgattctggacatcattttttccaaaagtcttggaaatgacaggaaatattgatgaagcagaatgggagtggaaagcaggattccatcgctggaacaattacatgatggactggaaaaatcaatttaacgattacactagcaagaaagaaagttgtgtgggtctc

SEQ ID NO: 114 - protein, 574 aa, Artificial Sequence
  synthetic butyrylcholinesterase variant
  VARIANT 227: Xaa = Ala
EDDIIIATKNGKVRGMNLTVFGGTVTAFLGIPYAQPPLGRLRFKKPQSLTKWSDIWNATKYANSCCQNIDQSFPGFHGSEMWNPNTDLSEDCLYLNVWIPAPKPKNATVLIWIYGGGFQTGTSSLHVYDGKFLARVERVIVVSMNYRVGALGFLALPGNPEAPGNMGLFDQQLALQWVQKNIAAFGGNPKSVTLFGESAGAASVSLHLLSPGSHSLFTRAILQSGSXNAPWAVTSLYEARNRTLNLAKLTGCSRENETEIIKCLRNKDPQEILLNEAFVVPYGTPLSVNFGPTVDGDFLTDMPDILLELGQFKKTQILVGVNKDEGTAFLVYGAPGFSKDNNSIITRKEFQEGLKIFFPGVSEFGKESILFHYTDWVDDQRPENYREALGDVVGDYNFICPALEFTKKFSEWGNNAFFYYFEHRSSKLSWPEWMGVMHGYEIEFVFGLPLERRDNYTKAEEILSRSIVKRWANFAKYGNPNETQNNSTSWPVFKSTEQKYLTLNTESTRIMTKLRAQQCRFWTSFFPKVLEMTGNIDEAEWEWKAGFHRWNNYMMDWKNQFNDYTSKKESCVGL

SEQ ID NO: 115 - DNA, 1722 bp, Artificial Sequence
  CDS (1)...(1722): synthetic butyrylcholinesterase variant
gaagatgacatcataattgcaacaaagaatggaaaagtcagagggatgaacttgacagtttttggtggcacggtaacagcctttcttggaattccctatgcacagccacctcttggtagacttcgattcaaaaagccacagtctctgaccaagtggtctgatatttggaatgccacaaaatatgcaaattcttgctgtcagaacatagatcaaagttttccaggcttccatggatcagagatgtggaacccaaacactgacctcagtgaagactgtttatatctaaatgtatggattccagcacctaaaccaaaaaatgccactgtattgatatggatttatggtggtggttttcaaactggaacatcatctttacatgtttatgatggcaagtttctggctcgggttgaaagagttattgtagtgtcaatgaactatagggtgggtgccctaggattcttagctttgccaggaaatcctgaggctccagggaacatgggtttatttgatcaacagttggctcttcagtgggttcaaaaaaatatagcagcctttggtggaaatcctaaaagtgtaactctctttggagaaagtgcaggagcagcttcagttagcctgcatttgctttctcctggaagccattcattgttcaccagagccattctgcaaagtggttccgckaatgctccttgggcggtaacatctctttatgaagctaggaacagaacgttgaacttagctaaattgactggttgctctagagagaatgagactgaaataatcaagtgtcttagaaataaagatccccaagaaattcttctgaatgaagcatttgttgtcccctatgggactcctttgtcagtaaactttggtccgaccgtggatggtgattttctcactgacatgccagacatattacttgaacttggacaatttaaaaaaacccagattttggtgggtgttaataaagatgaagggacagcttttttagtctatggtgctcctggcttcagcaaagataacaatagtatcataactagaaaagaatttcaggaaggtttaaaaatattttttccaggagtgagtgagtttggaaaggaatccatcctttttcattacacagactgggtagatgatcagagacctgaaaactaccgtgaggccttgggtgatgttgttggggattataatttcatatgccctgccttggagttcaccaagaagttctcagaatggggaaataatgcctttttctactattttgaacaccgatcctccaaacttacgtggccagaatggatgggagtgatgcatggctatgaaattgaatttgtctttggtttacctctggaaagaagagataattacacaaaagccgaggaaattttgagtagatccatagtgaaacggtgggcaaattttgcaaaatatgggaatccaaatgagactcagaacaatagcacaagctggcctgtcttcaaaagcactgaacaaaaatatctaaccttgaatacagagtcaacaagaataatgacgaaactacgtgctcaacaatgtcgattctggacatcattttttccaaaagtcttggaaatgacaggaaatattgatgaagcagaatgggagtggaaagcaggattccatcgctggaacaattacatgatggactggaaaaatcaatttaacgattacactagcaagaaagaaagttgtgtgggtctc

SEQ ID NO: 116 - protein, 574 aa, Artificial Sequence
  synthetic butyrylcholinesterase variant
  VARIANT 227: Xaa = Ala
EDDIIIATKNGKVRGMNLTVFGGTVTAFLGIPYAQPPLGRLRFKKPQSLTKWSDIWNATKYANSCCQNIDQSFPGFHGSEMWNPNTDLSEDCLYLNVWIPAPKPKNATVLIWIYGGGFQTGTSSLHVYDGKFLARVERVIVVSMNYRVGALGFLALPGNPEAPGNMGLFDQQLALQWVQKNIAAFGGNPKSVTLFGESAGAASVSLHLLSPGSHSLFTRAILQSGSXNAPWAVTSLYEARNRTLNLAKLTGCSRENETEIIKCLRNKDPQEILLNEAFVVPYGTPLSVNFGPTVDGDFLTDMPDILLELGQFKKTQILVGVNKDEGTAFLVYGAPGFSKDNNSIITRKEFQEGLKIFFPGVSEFGKESILFHYTDWVDDQRPENYREALGDVVGDYNFICPALEFTKKFSEWGNNAFFYYFEHRSSKLTWPEWMGVMHGYEIEFVFGLPLERRDNYTKAEEILSRSIVKRWANFAKYGNPNETQNNSTSWPVFKSTEQKYLTLNTESTRIMTKLRAQQCRFWTSFFPKVLEMTGNIDEAEWEWKAGFHRWNNYMMDWKNQFNDYTSKKESCVGL

SEQ ID NO: 117 - DNA, 1722 bp, Artificial Sequence
  CDS (1)...(1722): synthetic butyrylcholinesterase variant
gaagatgacatcataattgcaacaaagaatggaaaagtcagagggatgaacttgacagtttttggtggcacggtaacagcctttcttggaattccctatgcacagccacctcttggtagacttcgattcaaaaagccacagtctctgaccaagtggtctgatatttggaatgccacaaaatatgcaaattcttgctgtcagaacatagatcaaagttttccaggcttccatggatcagagatgtggaacccaaacactgacctcagtgaagactgtttatatctaaatgtatggattccagcacctaaaccaaaaaatgccactgtattgatatggatttatggtggtggttttcaaactggaacatcatctttacatgtttatgatggcaagtttctggctcgggttgaaagagttattgtagtgtcaatgaactatagggtgggtgccctaggattcttagctttgccaggaaatcctgaggctccagggaacatgggtttatttgatcaacagttggctcttcagtgggttcaaaaaaatatagcagcctttggtggaaatcctaaaagtgtaactctctttggagaaagtgcaggagcagcttcagttagcctgcatttgctttctcctggaagccattcattgttcaccagagccattctgcaaagtggttccgckaatgctccttgggcggtaacatctctttatgaagctaggaacagaacgttgaacttagctaaattgactggttgctctagagagaatgagactgaaataatcaagtgtcttagaaataaagatccccaagaaattcttctgaatgaagcatttgttgtcccctatgggactcctttgtcagtaaactttggtccgaccgtggatggtgattttctcactgacatgccagacatattacttgaacttggacaatttaaaaaaacccagattttggtgggtgttaataaagatgaagggacagcttttttagtctatggtgctcctggcttcagcaaagataacaatagtatcataactagaaaagaatttcaggaaggtttaaaaatattttttccaggagtgagtgagtttggaaaggaatccatcctttttcattacacagactgggtagatgatcagagacctgaaaactaccgtgaggccttgggtgatgttgttggggattataatttcatatgccctgccttggagttcaccaagaagttctcagaatggggaaataatgcctttttctactattttgaacaccgatcctccaaacttgtttggccagaatggatgggagtgatgcatggctatgaaattgaatttgtctttggtttacctctggaaagaagagataattacacaaaagccgaggaaattttgagtagatccatagtgaaacggtgggcaaattttgcaaaatatgggaatccaaatgagactcagaacaatagcacaagctggcctgtcttcaaaagcactgaacaaaaatatctaaccttgaatacagagtcaacaagaataatgacgaaactacgtgctcaacaatgtcgattctggacatcattttttccaaaagtcttggaaatgacaggaaatattgatgaagcagaatgggagtggaaagcaggattccatcgctggaacaattacatgatggactggaaaaatcaatttaacgattacactagcaagaaagaaagttgtgtgggtctc

SEQ ID NO: 118 - protein, 574 aa, Artificial Sequence
  synthetic butyrylcholinesterase variant
  VARIANT 227: Xaa = Ala
EDDIIIATKNGKVRGMNLTVFGGTVTAFLGIPYAQPPLGRLRFKKPQSLTKWSDIWNATKYANSCCQNIDQSFPGFHGSEMWNPNTDLSEDCLYLNVWIPAPKPKNATVLIWIYGGGFQTGTSSLHVYDGKFLARVERVIVVSMNYRVGALGFLALPGNPEAPGNMGLFDQQLALQWVQKNIAAFGGNPKSVTLFGESAGAASVSLHLLSPGSHSLFTRAILQSGSXNAPWAVTSLYEARNRTLNLAKLTGCSRENETEIIKCLRNKDPQEILLNEAFVVPYGTPLSVNFGPTVDGDFLTDMPDILLELGQFKKTQILVGVNKDEGTAFLVYGAPGFSKDNNSIITRKEFQEGLKIFFPGVSEFGKESILFHYTDWVDDQRPENYREALGDVVGDYNFICPALEFTKKFSEWGNNAFFYYFEHRSSKLVWPEWMGVMHGYEIEFVFGLPLERRDNYTKAEEILSRSIVKRWANFAKYGNPNETQNNSTSWPVFKSTEQKYLTLNTESTRIMTKLRAQQCRFWTSFFPKVLEMTGNIDEAEWEWKAGFHRWNNYMMDWKNQFNDYTSKKESCVGL

SEQ ID NO: 119 - DNA, 1722 bp, Artificial Sequence
  CDS (1)...(1722): synthetic butyrylcholinesterase variant
gaagatgacatcataattgcaacaaagaatggaaaagtcagagggatgaacttgacagtttttggtggcacggtaacagcctttcttggaattccctatgcacagccacctcttggtagacttcgattcaaaaagccacagtctctgaccaagtggtctgatatttggaatgccacaaaatatgcaaattcttgctgtcagaacatagatcaaagttttccaggcttccatggatcagagatgtggaacccaaacactgacctcagtgaagactgtttatatctaaatgtatggattccagcacctaaaccaaaaaatgccactgtattgatatggatttatggtggtggttttcaaactggaacatcatctttacatgtttatgatggcaagtttctggctcgggttgaaagagttattgtagtgtcaatgaactatagggtgggtgccctaggattcttagctttgccaggaaatcctgaggctccagggaacatgggtttatttgatcaacagttggctcttcagtgggttcaaaaaaatatagcagcctttggtggaaatcctaaaagtgtaactctctttggagaaagtgcaggagcagcttcagttagcctgcatttgctttctcctggaagccattcattgttcaccagagccattctgcaaagtggttccgckaatgctccttgggcggtaacatctctttatgaagctaggaacagaacgttgaacttagctaaattgactggttgctctagagagaatgagactgaaataatcaagtgtcttagaaataaagatccccaagaaattcttctgaatgaagcatttgttgtcccctatgggactcctttgtcagtaaactttggtccgaccgtggatggtgattttctcactgacatgccagacatattacttgaacttggacaatttaaaaaaacccagattttggtgggtgttaataaagatgaagggacagcttttttagtctatggtgctcctggcttcagcaaagataacaatagtatcataactagaaaagaatttcaggaaggtttaaaaatattttttccaggagtgagtgagtttggaaaggaatccatcctttttcattacacagactgggtagatgatcagagacctgaaaactaccgtgaggccttgggtgatgttgttggggattataatttcatatgccctgccttggagttcaccaagaagttctcagaatggggaaataatgcctttttctactattttgaacaccgatcctccaaacttccgatgccagaatggatgggagtgatgcatggctatgaaattgaatttgtctttggtttacctctggaaagaagagataattacacaaaagccgaggaaattttgagtagatccatagtgaaacggtgggcaaattttgcaaaatatgggaatccaaatgagactcagaacaatagcacaagctggcctgtcttcaaaagcactgaacaaaaatatctaaccttgaatacagagtcaacaagaataatgacgaaactacgtgctcaacaatgtcgattctggacatcattttttccaaaagtcttggaaatgacaggaaatattgatgaagcagaatgggagtggaaagcaggattccatcgctggaacaattacatgatggactggaaaaatcaatttaacgattacactagcaagaaagaaagttgtgtgggtctc

SEQ ID NO: 120 - protein, 574 aa, Artificial Sequence
  synthetic butyrylcholinesterase variant
  VARIANT 227: Xaa = Ala
EDDIIIATKNGKVRGMNLTVFGGTVTAFLGIPYAQPPLGRLRFKKPQSLTKWSDIWNATKYANSCCQNIDQSFPGFHGSEMWNPNTDLSEDCLYLNVWIPAPKPKNATVLIWIYGGGFQTGTSSLHVYDGKFLARVERVIVVSMNYRVGALGFLALPGNPEAPGNMGLFDQQLALQWVQKNIAAFGGNPKSVTLFGESAGAASVSLHLLSPGSHSLFTRAILQSGSXNAPWAVTSLYEARNRTLNLAKLTGCSRENETEIIKCLRNKDPQEILLNEAFVVPYGTPLSVNFGPTVDGDFLTDMPDILLELGQFKKTQILVGVNKDEGTAFLVYGAPGFSKDNNSIITRKEFQEGLKIFFPGVSEFGKESILFHYTDWVDDQRPENYREALGDVVGDYNFICPALEFTKKFSEWGNNAFFYYFEHRSSKLPMPEWMGVMHGYEIEFVFGLPLERRDNYTKAEEILSRSIVKRWANFAKYGNPNETQNNSTSWPVFKSTEQKYLTLNTESTRIMTKLRAQQCRFWTSFFPKVLEMTGNIDEAEWEWKAGFHRWNNYMMDWKNQFNDYTSKKESCVGL

SEQ ID NO: 121 - DNA, 1722 bp, Artificial Sequence
  CDS (1)...(1722): synthetic butyrylcholinesterase variant
gaagatgacatcataattgcaacaaagaatggaaaagtcagagggatgaacttgacagtttttggtggcacggtaacagcctttcttggaattccctatgcacagccacctcttggtagacttcgattcaaaaagccacagtctctgaccaagtggtctgatatttggaatgccacaaaatatgcaaattcttgctgtcagaacatagatcaaagttttccaggcttccatggatcagagatgtggaacccaaacactgacctcagtgaagactgtttatatctaaatgtatggattccagcacctaaaccaaaaaatgccactgtattgatatggatttatggtggtggttttcaaactggaacatcatctttacatgtttatgatggcaagtttctggctcgggttgaaagagttattgtagtgtcaatgaactatagggtgggtgccctaggattcttagctttgccaggaaatcctgaggctccagggaacatgggtttatttgatcaacagttggctcttcagtgggttcaaaaaaatatagcagcctttggtggaaatcctaaaagtgtaactctctttggagaaagtgcaggagcagcttcagttagcctgcatttgctttctcctggaagccattcattgttcaccagagccattctgcaaagtggttccgckaatgctccttgggcggtaacatctctttatgaagctaggaacagaacgttgaacttagctaaattgactggttgctctagagagaatgagactgaaataatcaagtgtcttagaaataaagatccccaagaaattcttctgaatgaagcatttgttgtcccctatgggactcctttgtcagtaaactttggtccgaccgtggatggtgattttctcactgacatgccagacatattacttgaacttggacaatttaaaaaaacccagattttggtgggtgttaataaagatgaagggacagcttttttagtctatggtgctcctggcttcagcaaagataacaatagtatcataactagaaaagaatttcaggaaggtttaaaaatattttttccaggagtgagtgagtttggaaaggaatccatcctttttcattacacagactgggtagatgatcagagacctgaaaactaccgtgaggccttgggtgatgttgttggggattataatttcatatgccctgccttggagttcaccaagaagttctcagaatggggaaataatgcctttttctactattttgaacaccgatcctccaaacttccgtatccagaatggatgggagtgatgcatggctatgaaattgaatttgtctttggtttacctctggaaagaagagataattacacaaaagccgaggaaattttgagtagatccatagtgaaacggtgggcaaattttgcaaaatatgggaatccaaatgagactcagaacaatagcacaagctggcctgtcttcaaaagcactgaacaaaaatatctaaccttgaatacagagtcaacaagaataatgacgaaactacgtgctcaacaatgtcgattctggacatcattttttccaaaagtcttggaaatgacaggaaatattgatgaagcagaatgggagtggaaagcaggattccatcgctggaacaattacatgatggactggaaaaatcaatttaacgattacactagcaagaaagaaagttgtgtgggtctc

SEQ ID NO: 122 - protein, 574 aa, Artificial Sequence
  synthetic butyrylcholinesterase variant
  VARIANT 227: Xaa = Ala
EDDIIIATKNGKVRGMNLTVFGGTVTAFLGIPYAQPPLGRLRFKKPQSLTKWSDIWNATKYANSCCQNIDQSFPGFHGSEMWNPNTDLSEDCLYLNVWIPAPKPKNATVLIWIYGGGFQTGTSSLHVYDGKFLARVERVIVVSMNYRVGALGFLALPGNPEAPGNMGLFDQQLALQWVQKNIAAFGGNPKSVTLFGESAGAASVSLHLLSPGSHSLFTRAILQSGSXNAPWAVTSLYEARNRTLNLAKLTGCSRENETEIIKCLRNKDPQEILLNEAFVVPYGTPLSVNFGPTVDGDFLTDMPDILLELGQFKKTQILVGVNKDEGTAFLVYGAPGFSKDNNSIITRKEFQEGLKIFFPGVSEFGKESILFHYTDWVDDQRPENYREALGDVVGDYNFICPALEFTKKFSEWGNNAFFYYFEHRSSKLPYPEWMGVMHGYEIEFVFGLPLERRDNYTKAEEILSRSIVKRWANFAKYGNPNETQNNSTSWPVFKSTEQKYLTLNTESTRIMTKLRAQQCRFWTSFFPKVLEMTGNIDEAEWEWKAGFHRWNNYMMDWKNQFNDYTSKKESCVGL

SEQ ID NO: 123 - DNA, 1722 bp, Artificial Sequence
  CDS (1)...(1722): synthetic butyrylcholinesterase variant
gaagatgacatcataattgcaacaaagaatggaaaagtcagagggatgaacttgacagtttttggtggcacggtaacagcctttcttggaattccctatgcacagccacctcttggtagacttcgattcaaaaagccacagtctctgaccaagtggtctgatatttggaatgccacaaaatatgcaaattcttgctgtcagaacatagatcaaagttttccaggcttccatggatcagagatgtggaacccaaacactgacctcagtgaagactgtttatatctaaatgtatggattccagcacctaaaccaaaaaatgccactgtattgatatggatttatggtggtggttttcaaactggaacatcatctttacatgtttatgatggcaagtttctggctcgggttgaaagagttattgtagtgtcaatgaactatagggtgggtgccctaggattcttagctttgccaggaaatcctgaggctccagggaacatgggtttatttgatcaacagttggctcttcagtgggttcaaaaaaatatagcagcctttggtggaaatcctaaaagtgtaactctctttggagaaagtgcaggagcagcttcagttagcctgcatttgctttctcctggaagccattcattgttcaccagagccattctgcaaagtggttccgckaatgctccttgggcggtaacatctctttatgaagctaggaacagaacgttgaacttagctaaattgactggttgctctagagagaatgagactgaaataatcaagtgtcttagaaataaagatccccaagaaattcttctgaatgaagcatttgttgtcccctatgggactcctttgtcagtaaactttggtccgaccgtggatggtgattttctcactgacatgccagacatattacttgaacttggacaatttaaaaaaacccagattttggtgggtgttaataaagatgaagggacagcttttttagtctatggtgctcctggcttcagcaaagataacaatagtatcataactagaaaagaatttcaggaaggtttaaaaatattttttccaggagtgagtgagtttggaaaggaatccatcctttttcattacacagactgggtagatgatcagagacctgaaaactaccgtgaggccttgggtgatgttgttggggattataatttcatatgccctgccttggagttcaccaagaagttctcagaatggggaaataatgcctttttctactattttgaacaccgatcctccaaacttccgtggcaggaatggatgggagtgatgcatggctatgaaattgaatttgtctttggtttacctctggaaagaagagataattacacaaaagccgaggaaattttgagtagatccatagtgaaacggtgggcaaattttgcaaaatatgggaatccaaatgagactcagaacaatagcacaagctggcctgtcttcaaaagcactgaacaaaaatatctaaccttgaatacagagtcaacaagaataatgacgaaactacgtgctcaacaatgtcgattctggacatcattttttccaaaagtcttggaaatgacaggaaatattgatgaagcagaatgggagtggaaagcaggattccatcgctggaacaattacatgatggactggaaaaatcaatttaacgattacactagcaagaaagaaagttgtgtgggtctc

SEQ ID NO: 124 - protein, 574 aa, Artificial Sequence
  synthetic butyrylcholinesterase variant
  VARIANT 227: Xaa = Ala
EDDIIIATKNGKVRGMNLTVFGGTVTAFLGIPYAQPPLGRLRFKKPQSLTKWSDIWNATKYANSCCQNIDQSFPGFHGSEMWNPNTDLSEDCLYLNVWIPAPKPKNATVLIWIYGGGFQTGTSSLHVYDGKFLARVERVIVVSMNYRVGALGFLALPGNPEAPGNMGLFDQQLALQWVQKNIAAFGGNPKSVTLFGESAGAASVSLHLLSPGSHSLFTRAILQSGSXNAPWAVTSLYEARNRTLNLAKLTGCSRENETEIIKCLRNKDPQEILLNEAFVVPYGTPLSVNFGPTVDGDFLTDMPDILLELGQFKKTQILVGVNKDEGTAFLVYGAPGFSKDNNSIITRKEFQEGLKIFFPGVSEFGKESILFHYTDWVDDQRPENYREALGDVVGDYNFICPALEFTKKFSEWGNNAFFYYFEHRSSKLPWQEWMGVMHGYEIEFVFGLPLERRDNYTKAEEILSRSIVKRWANFAKYGNPNETQNNSTSWPVFKSTEQKYLTLNTESTRIMTKLRAQQCRFWTSFFPKVLEMTGNIDEAEWEWKAGFHRWNNYMMDWKNQFNDYTSKKESCVGL

SEQ ID NO: 125 - DNA, 1722 bp, Artificial Sequence
  CDS (1)...(1722): synthetic butyrylcholinesterase variant
gaagatgacatcataattgcaacaaagaatggaaaagtcagagggatgaacttgacagtttttggtggcacggtaacagcctttcttggaattccctatgcacagccacctcttggtagacttcgattcaaaaagccacagtctctgaccaagtggtctgatatttggaatgccacaaaatatgcaaattcttgctgtcagaacatagatcaaagttttccaggcttccatggatcagagatgtggaacccaaacactgacctcagtgaagactgtttatatctaaatgtatggattccagcacctaaaccaaaaaatgccactgtattgatatggatttatggtggtggttttcaaactggaacatcatctttacatgtttatgatggcaagtttctggctcgggttgaaagagttattgtagtgtcaatgaactatagggtgggtgccctaggattcttagctttgccaggaaatcctgaggctccagggaacatgggtttatttgatcaacagttggctcttcagtgggttcaaaaaaatatagcagcctttggtggaaatcctaaaagtgtaactctctttggagaaagtgcaggagcagcttcagttagcctgcatttgctttctcctggaagccattcattgttcaccagagccattctgcaaagtggttccgckaatgctccttgggcggtaacatctctttatgaagctaggaacagaacgttgaacttagctaaattgactggttgctctagagagaatgagactgaaataatcaagtgtcttagaaataaagatccccaagaaattcttctgaatgaagcatttgttgtcccctatgggactcctttgtcagtaaactttggtccgaccgtggatggtgattttctcactgacatgccagacatattacttgaacttggacaatttaaaaaaacccagattttggtgggtgttaataaagatgaagggacagcttttttagtctatggtgctcctggcttcagcaaagataacaatagtatcataactagaaaagaatttcaggaaggtttaaaaatattttttccaggagtgagtgagtttggaaaggaatccatcctttttcattacacagactgggtagatgatcagagacctgaaaactaccgtgaggccttgggtgatgttgttggggattataatttcatatgccctgccttggagttcaccaagaagttctcagaatggggaaataatgcctttttctactattttgaacaccgatcctccaaacttccgtggccagaagggatgggagtgatgcatggctatgaaattgaatttgtctttggtttacctctggaaagaagagataattacacaaaagccgaggaaattttgagtagatccatagtgaaacggtgggcaaattttgcaaaatatgggaatccaaatgagactcagaacaatagcacaagctggcctgtcttcaaaagcactgaacaaaaatatctaaccttgaatacagagtcaacaagaataatgacgaaactacgtgctcaacaatgtcgattctggacatcattttttccaaaagtcttggaaatgacaggaaatattgatgaagcagaatgggagtggaaagcaggattccatcgctggaacaattacatgatggactggaaaaatcaatttaacgattacactagcaagaaagaaagttgtgtgggtctc

SEQ ID NO: 126 - protein, 574 aa, Artificial Sequence
  synthetic butyrylcholinesterase variant
  VARIANT 227: Xaa = Ala
EDDIIIATKNGKVRGMNLTVFGGTVTAFLGIPYAQPPLGRLRFKKPQSLTKWSDIWNATKYANSCCQNIDQSFPGFHGSEMWNPNTDLSEDCLYLNVWIPAPKPKNATVLIWIYGGGFQTGTSSLHVYDGKFLARVERVIVVSMNYRVGALGFLALPGNPEAPGNMGLFDQQLALQWVQKNIAAFGGNPKSVTLFGESAGAASVSLHLLSPGSHSLFTRAILQSGSXNAPWAVTSLYEARNRTLNLAKLTGCSRENETEIIKCLRNKDPQEILLNEAFVVPYGTPLSVNFGPTVDGDFLTDMPDILLELGQFKKTQILVGVNKDEGTAFLVYGAPGFSKDNNSIITRKEFQEGLKIFFPGVSEFGKESILFHYTDWVDDQRPENYREALGDVVGDYNFICPALEFTKKFSEWGNNAFFYYFEHRSSKLPWPEGMGVMHGYEIEFVFGLPLERRDNYTKAEEILSRSIVKRWANFAKYGNPNETQNNSTSWPVFKSTEQKYLTLNTESTRIMTKLRAQQCRFWTSFFPKVLEMTGNIDEAEWEWKAGFHRWNNYMMDWKNQFNDYTSKKESCVGL

SEQ ID NO: 127 - DNA, 1722 bp, Artificial Sequence
  CDS (1)...(1722): synthetic butyrylcholinesterase variant
gaagatgacatcataattgcaacaaagaatggaaaagtcagagggatgaacttgacagtttttggtggcacggtaacagcctttcttggaattccctatgcacagccacctcttggtagacttcgattcaaaaagccacagtctctgaccaagtggtctgatatttggaatgccacaaaatatgcaaattcttgctgtcagaacatagatcaaagttttccaggcttccatggatcagagatgtggaacccaaacactgacctcagtgaagactgtttatatctaaatgtatggattccagcacctaaaccaaaaaatgccactgtattgatatggatttatggtggtggttttcaaactggaacatcatctttacatgtttatgatggcaagtttctggctcgggttgaaagagttattgtagtgtcaatgaactatagggtgggtgccctaggattcttagctttgccaggaaatcctgaggctccagggaacatgggtttatttgatcaacagttggctcttcagtgggttcaaaaaaatatagcagcctttggtggaaatcctaaaagtgtaactctctttggagaaagtgcaggagcagcttcagttagcctgcatttgctttctcctggaagccattcattgttcaccagagccattctgcaaagtggttccgckaatgctccttgggcggtaacatctctttatgaagctaggaacagaacgttgaacttagctaaattgactggttgctctagagagaatgagactgaaataatcaagtgtcttagaaataaagatccccaagaaattcttctgaatgaagcatttgttgtcccctatgggactcctttgtcagtaaactttggtccgaccgtggatggtgattttctcactgacatgccagacatattacttgaacttggacaatttaaaaaaacccagattttggtgggtgttaataaagatgaagggacagcttttttagtctatggtgctcctggcttcagcaaagataacaatagtatcataactagaaaagaatttcaggaaggtttaaaaatattttttccaggagtgagtgagtttggaaaggaatccatcctttttcattacacagactgggtagatgatcagagacctgaaaactaccgtgaggccttgggtgatgttgttggggattataatttcatatgccctgccttggagttcaccaagaagttctcagaatggggaaataatgcctttttctactattttgaacaccgatcctccaaacttccgtggccagaatggtttggagtgatgcatggctatgaaattgaatttgtctttggtttacctctggaaagaagagataattacacaaaagccgaggaaattttgagtagatccatagtgaaacggtgggcaaattttgcaaaatatgggaatccaaatgagactcagaacaatagcacaagctggcctgtcttcaaaagcactgaacaaaaatatctaaccttgaatacagagtcaacaagaataatgacgaaactacgtgctcaacaatgtcgattctggacatcattttttccaaaagtcttggaaatgacaggaaatattgatgaagcagaatgggagtggaaagcaggattccatcgctggaacaattacatgatggactggaaaaatcaatttaacgattacactagcaagaaagaaagttgtgtgggtctc

SEQ ID NO: 128 - protein, 574 aa, Artificial Sequence
  synthetic butyrylcholinesterase variant
  VARIANT 227: Xaa = Ala
EDDIIIATKNGKVRGMNLTVFGGTVTAFLGIPYAQPPLGRLRFKKPQSLTKWSDIWNATKYANSCCQNIDQSFPGFHGSEMWNPNTDLSEDCLYLNVWIPAPKPKNATVLIWIYGGGFQTGTSSLHVYDGKFLARVERVIVVSMNYRVGALGFLALPGNPEAPGNMGLFDQQLALQWVQKNIAAFGGNPKSVTLFGESAGAASVSLHLLSPGSHSLFTRAILQSGSXNAPWAVTSLYEARNRTLNLAKLTGCSRENETEIIKCLRNKDPQEILLNEAFVVPYGTPLSVNFGPTVDGDFLTDMPDILLELGQFKKTQILVGVNKDEGTAFLVYGAPGFSKDNNSIITRKEFQEGLKIFFPGVSEFGKESILFHYTDWVDDQRPENYREALGDVVGDYNFICPALEFTKKFSEWGNNAFFYYFEHRSSKLPWPEWFGVMHGYEIEFVFGLPLERRDNYTKAEEILSRSIVKRWANFAKYGNPNETQNNSTSWPVFKSTEQKYLTLNTESTRIMTKLRAQQCRFWTSFFPKVLEMTGNIDEAEWEWKAGFHRWNNYMMDWKNQFNDYTSKKESCVGL

SEQ ID NO: 129 - DNA, 1722 bp, Artificial Sequence
  CDS (1)...(1722): synthetic butyrylcholinesterase variant
gaagatgacatcataattgcaacaaagaatggaaaagtcagagggatgaacttgacagtttttggtggcacggtaacagcctttcttggaattccctatgcacagccacctcttggtagacttcgattcaaaaagccacagtctctgaccaagtggtctgatatttggaatgccacaaaatatgcaaattcttgctgtcagaacatagatcaaagttttccaggcttccatggatcagagatgtggaacccaaacactgacctcagtgaagactgtttatatctaaatgtatggattccagcacctaaaccaaaaaatgccactgtattgatatggatttatggtggtggttttcaaactggaacatcatctttacatgtttatgatggcaagtttctggctcgggttgaaagagttattgtagtgtcaatgaactatagggtgggtgccctaggattcttagctttgccaggaaatcctgaggctccagggaacatgggtttatttgatcaacagttggctcttcagtgggttcaaaaaaatatagcagcctttggtggaaatcctaaaagtgtaactctctttggagaaagtgcaggagcagcttcagttagcctgcatttgctttctcctggaagccattcattgttcaccagagccattctgcaaagtggttccgckaatgctccttgggcggtaacatctctttatgaagctaggaacagaacgttgaacttagctaaattgactggttgctctagagagaatgagactgaaataatcaagtgtcttagaaataaagatccccaagaaattcttctgaatgaagcatttgttgtcccctatgggactcctttgtcagtaaactttggtccgaccgtggatggtgattttctcactgacatgccagacatattacttgaacttggacaatttaaaaaaacccagattttggtgggtgttaataaagatgaagggacagcttttttagtctatggtgctcctggcttcagcaaagataacaatagtatcataactagaaaagaatttcaggaaggtttaaaaatattttttccaggagtgagtgagtttggaaaggaatccatcctttttcattacacagactgggtagatgatcagagacctgaaaactaccgtgaggccttgggtgatgttgttggggattataatttcatatgccctgccttggagttcaccaagaagttctcagaatggggaaataatgcctttttctactattttgaacaccgatcctccaaacttccgtggccagaatgggggggagtgatgcatggctatgaaattgaatttgtctttggtttacctctggaaagaagagataattacacaaaagccgaggaaattttgagtagatccatagtgaaacggtgggcaaattttgcaaaatatgggaatccaaatgagactcagaacaatagcacaagctggcctgtcttcaaaagcactgaacaaaaatatctaaccttgaatacagagtcaacaagaataatgacgaaactacgtgctcaacaatgtcgattctggacatcattttttccaaaagtcttggaaatgacaggaaatattgatgaagcagaatgggagtggaaagcaggattccatcgctggaacaattacatgatggactggaaaaatcaatttaacgattacactagcaagaaagaaagttgtgtgggtctc

SEQ ID NO: 130 - protein, 574 aa, Artificial Sequence
  synthetic butyrylcholinesterase variant
  VARIANT 227: Xaa = Ala
EDDIIIATKNGKVRGMNLTVFGGTVTAFLGIPYAQPPLGRLRFKKPQSLTKWSDIWNATKYANSCCQNIDQSFPGFHGSEMWNPNTDLSEDCLYLNVWIPAPKPKNATVLIWIYGGGFQTGTSSLHVYDGKFLARVERVIVVSMNYRVGALGFLALPGNPEAPGNMGLFDQQLALQWVQKNIAAFGGNPKSVTLFGESAGAASVSLHLLSPGSHSLFTRAILQSGSXNAPWAVTSLYEARNRTLNLAKLTGCSRENETEIIKCLRNKDPQEILLNEAFVVPYGTPLSVNFGPTVDGDFLTDMPDILLELGQFKKTQILVGVNKDEGTAFLVYGAPGFSKDNNSIITRKEFQEGLKIFFPGVSEFGKESILFHYTDWVDDQRPENYREALGDVVGDYNFICPALEFTKKFSEWGNNAFFYYFEHRSSKLPWPEWGGVMHGYEIEFVFGLPLERRDNYTKAEEILSRSIVKRWANFAKYGNPNETQNNSTSWPVFKSTEQKYLTLNTESTRIMTKLRAQQCRFWTSFFPKVLEMTGNIDEAEWEWKAGFHRWNNYMMDWKNQFNDYTSKKESCVGL

SEQ ID NO: 131 - DNA, 1722 bp, Artificial Sequence
  CDS (1)...(1722): synthetic butyrylcholinesterase variant
gaagatgacatcataattgcaacaaagaatggaaaagtcagagggatgaacttgacagtttttggtggcacggtaacagcctttcttggaattccctatgcacagccacctcttggtagacttcgattcaaaaagccacagtctctgaccaagtggtctgatatttggaatgccacaaaatatgcaaattcttgctgtcagaacatagatcaaagttttccaggcttccatggatcagagatgtggaacccaaacactgacctcagtgaagactgtttatatctaaatgtatggattccagcacctaaaccaaaaaatgccactgtattgatatggatttatggtggtggttttcaaactggaacatcatctttacatgtttatgatggcaagtttctggctcgggttgaaagagttattgtagtgtcaatgaactatagggtgggtgccctaggattcttagctttgccaggaaatcctgaggctccagggaacatgggtttatttgatcaacagttggctcttcagtgggttcaaaaaaatatagcagcctttggtggaaatcctaaaagtgtaactctctttggagaaagtgcaggagcagcttcagttagcctgcatttgctttctcctggaagccattcattgttcaccagagccattctgcaaagtggttccgckaatgctccttgggcggtaacatctctttatgaagctaggaacagaacgttgaacttagctaaattgactggttgctctagagagaatgagactgaaataatcaagtgtcttagaaataaagatccccaagaaattcttctgaatgaagcatttgttgtcccctatgggactcctttgtcagtaaactttggtccgaccgtggatggtgattttctcactgacatgccagacatattacttgaacttggacaatttaaaaaaacccagattttggtgggtgttaataaagatgaagggacagcttttttagtctatggtgctcctggcttcagcaaagataacaatagtatcataactagaaaagaatttcaggaaggtttaaaaatattttttccaggagtgagtgagtttggaaaggaatccatcctttttcattacacagactgggtagatgatcagagacctgaaaactaccgtgaggccttgggtgatgttgttggggattataatttcatatgccctgccttggagttcaccaagaagttctcagaatggggaaataatgcctttttctactattttgaacaccgatcctccaaacttccgtggccagaatggaagggagtgatgcatggctatgaaattgaatttgtctttggtttacctctggaaagaagagataattacacaaaagccgaggaaattttgagtagatccatagtgaaacggtgggcaaattttgcaaaatatgggaatccaaatgagactcagaacaatagcacaagctggcctgtcttcaaaagcactgaacaaaaatatctaaccttgaatacagagtcaacaagaataatgacgaaactacgtgctcaacaatgtcgattctggacatcattttttccaaaagtcttggaaatgacaggaaatattgatgaagcagaatgggagtggaaagcaggattccatcgctggaacaattacatgatggactggaaaaatcaatttaacgattacactagcaagaaagaaagttgtgtgggtctc

SEQ ID NO: 132 - protein, 574 aa, Artificial Sequence
  synthetic butyrylcholinesterase variant
  VARIANT 227: Xaa = Ala
EDDIIIATKNGKVRGMNLTVFGGTVTAFLGIPYAQPPLGRLRFKKPQSLTKWSDIWNATKYANSCCQNIDQSFPGFHGSEMWNPNTDLSEDCLYLNVWIPAPKPKNATVLIWIYGGGFQTGTSSLHVYDGKFLARVERVIVVSMNYRVGALGFLALPGNPEAPGNMGLFDQQLALQWVQKNIAAFGGNPKSVTLFGESAGAASVSLHLLSPGSHSLFTRAILQSGSXNAPWAVTSLYEARNRTLNLAKLTGCSRENETEIIKCLRNKDPQEILLNEAFVVPYGTPLSVNFGPTVDGDFLTDMPDILLELGQFKKTQILVGVNKDEGTAFLVYGAPGFSKDNNSIITRKEFQEGLKIFFPGVSEFGKESILFHYTDWVDDQRPENYREALGDVVGDYNFICPALEFTKKFSEWGNNAFFYYFEHRSSKLPWPEWKGVMHGYEIEFVFGLPLERRDNYTKAEEILSRSIVKRWANFAKYGNPNETQNNSTSWPVFKSTEQKYLTLNTESTRIMTKLRAQQCRFWTSFFPKVLEMTGNIDEAEWEWKAGFHRWNNYMMDWKNQFNDYTSKKESCVGL

SEQ ID NO: 133 - DNA, 1722 bp, Artificial Sequence
  CDS (1)...(1722): synthetic butyrylcholinesterase variant
gaagatgacatcataattgcaacaaagaatggaaaagtcagagggatgaacttgacagtttttggtggcacggtaacagcctttcttggaattccctatgcacagccacctcttggtagacttcgattcaaaaagccacagtctctgaccaagtggtctgatatttggaatgccacaaaatatgcaaattcttgctgtcagaacatagatcaaagttttccaggcttccatggatcagagatgtggaacccaaacactgacctcagtgaagactgtttatatctaaatgtatggattccagcacctaaaccaaaaaatgccactgtattgatatggatttatggtggtggttttcaaactggaacatcatctttacatgtttatgatggcaagtttctggctcgggttgaaagagttattgtagtgtcaatgaactatagggtgggtgccctaggattcttagctttgccaggaaatcctgaggctccagggaacatgggtttatttgatcaacagttggctcttcagtgggttcaaaaaaatatagcagcctttggtggaaatcctaaaagtgtaactctctttggagaaagtgcaggagcagcttcagttagcctgcatttgctttctcctggaagccattcattgttcaccagagccattctgcaaagtggttccgckaatgctccttgggcggtaacatctctttatgaagctaggaacagaacgttgaacttagctaaattgactggttgctctagagagaatgagactgaaataatcaagtgtcttagaaataaagatccccaagaaattcttctgaatgaagcatttgttgtcccctatgggactcctttgtcagtaaactttggtccgaccgtggatggtgattttctcactgacatgccagacatattacttgaacttggacaatttaaaaaaacccagattttggtgggtgttaataaagatgaagggacagcttttttagtctatggtgctcctggcttcagcaaagataacaatagtatcataactagaaaagaatttcaggaaggtttaaaaatattttttccaggagtgagtgagtttggaaaggaatccatcctttttcattacacagactgggtagatgatcagagacctgaaaactaccgtgaggccttgggtgatgttgttggggattataatttcatatgccctgccttggagttcaccaagaagttctcagaatggggaaataatgcctttttctactattttgaacaccgatcctccaaacttccgtggccagaatggctgggagtgatgcatggctatgaaattgaatttgtctttggtttacctctggaaagaagagataattacacaaaagccgaggaaattttgagtagatccatagtgaaacggtgggcaaattttgcaaaatatgggaatccaaatgagactcagaacaatagcacaagctggcctgtcttcaaaagcactgaacaaaaatatctaaccttgaatacagagtcaacaagaataatgacgaaactacgtgctcaacaatgtcgattctggacatcattttttccaaaagtcttggaaatgacaggaaatattgatgaagcagaatgggagtggaaagcaggattccatcgctggaacaattacatgatggactggaaaaatcaatttaacgattacactagcaagaaagaaagttgtgtgggtctc

SEQ ID NO: 134 - protein, 574 aa, Artificial Sequence
  synthetic butyrylcholinesterase variant
  VARIANT 227: Xaa = Ala
EDDIIIATKNGKVRGMNLTVFGGTVTAFLGIPYAQPPLGRLRFKKPQSLTKWSDIWNATKYANSCCQNIDQSFPGFHGSEMWNPNTDLSEDCLYLNVWIPAPKPKNATVLIWIYGGGFQTGTSSLHVYDGKFLARVERVIVVSMNYRVGALGFLALPGNPEAPGNMGLFDQQLALQWVQKNIAAFGGNPKSVTLFGESAGAASVSLHLLSPGSHSLFTRAILQSGSXNAPWAVTSLYEARNRTLNLAKLTGCSRENETEIIKCLRNKDPQEILLNEAFVVPYGTPLSVNFGPTVDGDFLTDMPDILLELGQFKKTQILVGVNKDEGTAFLVYGAPGFSKDNNSIITRKEFQEGLKIFFPGVSEFGKESILFHYTDWVDDQRPENYREALGDVVGDYNFICPALEFTKKFSEWGNNAFFYYFEHRSSKLPWPEWLGVMHGYEIEFVFGLPLERRDNYTKAEEILSRSIVKRWANFAKYGNPNETQNNSTSWPVFKSTEQKYLTLNTESTRIMTKLRAQQCRFWTSFFPKVLEMTGNIDEAEWEWKAGFHRWNNYMMDWKNQFNDYTSKKESCVGL

SEQ ID NO: 135 - DNA, 1722 bp, Artificial Sequence
  CDS (1)...(1722): synthetic butyrylcholinesterase variant
gaagatgacatcataattgcaacaaagaatggaaaagtcagagggatgaacttgacagtttttggtggcacggtaacagcctttcttggaattccctatgcacagccacctcttggtagacttcgattcaaaaagccacagtctctgaccaagtggtctgatatttggaatgccacaaaatatgcaaattcttgctgtcagaacatagatcaaagttttccaggcttccatggatcagagatgtggaacccaaacactgacctcagtgaagactgtttatatctaaatgtatggattccagcacctaaaccaaaaaatgccactgtattgatatggatttatggtggtggttttcaaactggaacatcatctttacatgtttatgatggcaagtttctggctcgggttgaaagagttattgtagtgtcaatgaactatagggtgggtgccctaggattcttagctttgccaggaaatcctgaggctccagggaacatgggtttatttgatcaacagttggctcttcagtgggttcaaaaaaatatagcagcctttggtggaaatcctaaaagtgtaactctctttggagaaagtgcaggagcagcttcagttagcctgcatttgctttctcctggaagccattcattgttcaccagagccattctgcaaagtggttccgckaatgctccttgggcggtaacatctctttatgaagctaggaacagaacgttgaacttagctaaattgactggttgctctagagagaatgagactgaaataatcaagtgtcttagaaataaagatccccaagaaattcttctgaatgaagcatttgttgtcccctatgggactcctttgtcagtaaactttggtccgaccgtggatggtgattttctcactgacatgccagacatattacttgaacttggacaatttaaaaaaacccagattttggtgggtgttaataaagatgaagggacagcttttttagtctatggtgctcctggcttcagcaaagataacaatagtatcataactagaaaagaatttcaggaaggtttaaaaatattttttccaggagtgagtgagtttggaaaggaatccatcctttttcattacacagactgggtagatgatcagagacctgaaaactaccgtgaggccttgggtgatgttgttggggattataatttcatatgccctgccttggagttcaccaagaagttctcagaatggggaaataatgcctttttctactattttgaacaccgatcctccaaacttccgtggccagaatggaatggagtgatgcatggctatgaaattgaatttgtctttggtttacctctggaaagaagagataattacacaaaagccgaggaaattttgagtagatccatagtgaaacggtgggcaaattttgcaaaatatgggaatccaaatgagactcagaacaatagcacaagctggcctgtcttcaaaagcactgaacaaaaatatctaaccttgaatacagagtcaacaagaataatgacgaaactacgtgctcaacaatgtcgattctggacatcattttttccaaaagtcttggaaatgacaggaaatattgatgaagcagaatgggagtggaaagcaggattccatcgctggaacaattacatgatggactggaaaaatcaatttaacgattacactagcaagaaagaaagttgtgtgggtctc

SEQ ID NO: 136 - protein, 574 aa, Artificial Sequence
  synthetic butyrylcholinesterase variant
  VARIANT 227: Xaa = Ala
EDDIIIATKNGKVRGMNLTVFGGTVTAFLGIPYAQPPLGRLRFKKPQSLTKWSDIWNATKYANSCCQNIDQSFPGFHGSEMWNPNTDLSEDCLYLNVWIPAPKPKNATVLIWIYGGGFQTGTSSLHVYDGKFLARVERVIVVSMNYRVGALGFLALPGNPEAPGNMGLFDQQLALQWVQKNIAAFGGNPKSVTLFGESAGAASVSLHLLSPGSHSLFTRAILQSGSXNAPWAVTSLYEARNRTLNLAKLTGCSRENETEIIKCLRNKDPQEILLNEAFVVPYGTPLSVNFGPTVDGDFLTDMPDILLELGQFKKTQILVGVNKDEGTAFLVYGAPGFSKDNNSIITRKEFQEGLKIFFPGVSEFGKESILFHYTDWVDDQRPENYREALGDVVGDYNFICPALEFTKKFSEWGNNAFFYYFEHRSSKLPWPEWNGVMHGYEIEFVFGLPLERRDNYTKAEEILSRSIVKRWANFAKYGNPNETQNNSTSWPVFKSTEQKYLTLNTESTRIMTKLRAQQCRFWTSFFPKVLEMTGNIDEAEWEWKAGFHRWNNYMMDWKNQFNDYTSKKESCVGL

SEQ ID NO: 137 - DNA, 1722 bp, Artificial Sequence
  CDS (1)...(1722): synthetic butyrylcholinesterase variant
gaagatgacatcataattgcaacaaagaatggaaaagtcagagggatgaacttgacagtttttggtggcacggtaacagcctttcttggaattccctatgcacagccacctcttggtagacttcgattcaaaaagccacagtctctgaccaagtggtctgatatttggaatgccacaaaatatgcaaattcttgctgtcagaacatagatcaaagttttccaggcttccatggatcagagatgtggaacccaaacactgacctcagtgaagactgtttatatctaaatgtatggattccagcacctaaaccaaaaaatgccactgtattgatatggatttatggtggtggttttcaaactggaacatcatctttacatgtttatgatggcaagtttctggctcgggttgaaagagttattgtagtgtcaatgaactatagggtgggtgccctaggattcttagctttgccaggaaatcctgaggctccagggaacatgggtttatttgatcaacagttggctcttcagtgggttcaaaaaaatatagcagcctttggtggaaatcctaaaagtgtaactctctttggagaaagtgcaggagcagcttcagttagcctgcatttgctttctcctggaagccattcattgttcaccagagccattctgcaaagtggttccgckaatgctccttgggcggtaacatctctttatgaagctaggaacagaacgttgaacttagctaaattgactggttgctctagagagaatgagactgaaataatcaagtgtcttagaaataaagatccccaagaaattcttctgaatgaagcatttgttgtcccctatgggactcctttgtcagtaaactttggtccgaccgtggatggtgattttctcactgacatgccagacatattacttgaacttggacaatttaaaaaaacccagattttggtgggtgttaataaagatgaagggacagcttttttagtctatggtgctcctggcttcagcaaagataacaatagtatcataactagaaaagaatttcaggaaggtttaaaaatattttttccaggagtgagtgagtttggaaaggaatccatcctttttcattacacagactgggtagatgatcagagacctgaaaactaccgtgaggccttgggtgatgttgttggggattataatttcatatgccctgccttggagttcaccaagaagttctcagaatggggaaataatgcctttttctactattttgaacaccgatcctccaaacttccgtggccagaatggtcgggagtgatgcatggctatgaaattgaatttgtctttggtttacctctggaaagaagagataattacacaaaagccgaggaaattttgagtagatccatagtgaaacggtgggcaaattttgcaaaatatgggaatccaaatgagactcagaacaatagcacaagctggcctgtcttcaaaagcactgaacaaaaatatctaaccttgaatacagagtcaacaagaataatgacgaaactacgtgctcaacaatgtcgattctggacatcattttttccaaaagtcttggaaatgacaggaaatattgatgaagcagaatgggagtggaaagcaggattccatcgctggaacaattacatgatggactggaaaaatcaatttaacgattacactagcaagaaagaaagttgtgtgggtctc

SEQ ID NO: 138 - protein, 574 aa, Artificial Sequence
  synthetic butyrylcholinesterase variant
  VARIANT 227: Xaa = Ala
EDDIIIATKNGKVRGMNLTVFGGTVTAFLGIPYAQPPLGRLRFKKPQSLTKWSDIWNATKYANSCCQNIDQSFPGFHGSEMWNPNTDLSEDCLYLNVWIPAPKPKNATVLIWIYGGGFQTGTSSLHVYDGKFLARVERVIVVSMNYRVGALGFLALPGNPEAPGNMGLFDQQLALQWVQKNIAAFGGNPKSVTLFGESAGAASVSLHLLSPGSHSLFTRAILQSGSXNAPWAVTSLYEARNRTLNLAKLTGCSRENETEIIKCLRNKDPQEILLNEAFVVPYGTPLSVNFGPTVDGDFLTDMPDILLELGQFKKTQILVGVNKDEGTAFLVYGAPGFSKDNNSIITRKEFQEGLKIFFPGVSEFGKESILFHYTDWVDDQRPENYREALGDVVGDYNFICPALEFTKKFSEWGNNAFFYYFEHRSSKLPWPEWSGVMHGYEIEFVFGLPLERRDNYTKAEEILSRSIVKRWANFAKYGNPNETQNNSTSWPVFKSTEQKYLTLNTESTRIMTKLRAQQCRFWTSFFPKVLEMTGNIDEAEWEWKAGFHRWNNYMMDWKNQFNDYTSKKESCVGL

SEQ ID NO: 139 - DNA, 1722 bp, Artificial Sequence
  CDS (1)...(1722): synthetic butyrylcholinesterase variant
gaagatgacatcataattgcaacaaagaatggaaaagtcagagggatgaacttgacagtttttggtggcacggtaacagcctttcttggaattccctatgcacagccacctcttggtagacttcgattcaaaaagccacagtctctgaccaagtggtctgatatttggaatgccacaaaatatgcaaattcttgctgtcagaacatagatcaaagttttccaggcttccatggatcagagatgtggaacccaaacactgacctcagtgaagactgtttatatctaaatgtatggattccagcacctaaaccaaaaaatgccactgtattgatatggatttatggtggtggttttcaaactggaacatcatctttacatgtttatgatggcaagtttctggctcgggttgaaagagttattgtagtgtcaatgaactatagggtgggtgccctaggattcttagctttgccaggaaatcctgaggctccagggaacatgggtttatttgatcaacagttggctcttcagtgggttcaaaaaaatatagcagcctttggtggaaatcctaaaagtgtaactctctttggagaaagtgcaggagcagcttcagttagcctgcatttgctttctcctggaagccattcattgttcaccagagccattctgcaaagtggttccgckaatgctccttgggcggtaacatctctttatgaagctaggaacagaacgttgaacttagctaaattgactggttgctctagagagaatgagactgaaataatcaagtgtcttagaaataaagatccccaagaaattcttctgaatgaagcatttgttgtcccctatgggactcctttgtcagtaaactttggtccgaccgtggatggtgattttctcactgacatgccagacatattacttgaacttggacaatttaaaaaaacccagattttggtgggtgttaataaagatgaagggacagcttttttagtctatggtgctcctggcttcagcaaagataacaatagtatcataactagaaaagaatttcaggaaggtttaaaaatattttttccaggagtgagtgagtttggaaaggaatccatcctttttcattacacagactgggtagatgatcagagacctgaaaactaccgtgaggccttgggtgatgttgttggggattataatttcatatgccctgccttggagttcaccaagaagttctcagaatggggaaataatgcctttttctactattttgaacaccgatcctccaaacttccgtggccagaatggtggggagtgatgcatggctatgaaattgaatttgtctttggtttacctctggaaagaagagataattacacaaaagccgaggaaattttgagtagatccatagtgaaacggtgggcaaattttgcaaaatatgggaatccaaatgagactcagaacaatagcacaagctggcctgtcttcaaaagcactgaacaaaaatatctaaccttgaatacagagtcaacaagaataatgacgaaactacgtgctcaacaatgtcgattctggacatcattttttccaaaagtcttggaaatgacaggaaatattgatgaagcagaatgggagtggaaagcaggattccatcgctggaacaattacatgatggactggaaaaatcaatttaacgattacactagcaagaaagaaagttgtgtgggtctc

SEQ ID NO: 140 - protein, 574 aa, Artificial Sequence
  synthetic butyrylcholinesterase variant
  VARIANT 227: Xaa = Ala
EDDIIIATKNGKVRGMNLTVFGGTVTAFLGIPYAQPPLGRLRFKKPQSLTKWSDIWNATKYANSCCQNIDQSFPGFHGSEMWNPNTDLSEDCLYLNVWIPAPKPKNATVLIWIYGGGFQTGTSSLHVYDGKFLARVERVIVVSMNYRVGALGFLALPGNPEAPGNMGLFDQQLALQWVQKNIAAFGGNPKSVTLFGESAGAASVSLHLLSPGSHSLFTRAILQSGSXNAPWAVTSLYEARNRTLNLAKLTGCSRENETEIIKCLRNKDPQEILLNEAFVVPYGTPLSVNFGPTVDGDFLTDMPDILLELGQFKKTQILVGVNKDEGTAFLVYGAPGFSKDNNSIITRKEFQEGLKIFFPGVSEFGKESILFHYTDWVDDQRPENYREALGDVVGDYNFICPALEFTKKFSEWGNNAFFYYFEHRSSKLPWPEWWGVMHGYEIEFVFGLPLERRDNYTKAEEILSRSIVKRWANFAKYGNPNETQNNSTSWPVFKSTEQKYLTLNTESTRIMTKLRAQQCRFWTSFFPKVLEMTGNIDEAEWEWKAGFHRWNNYMMDWKNQFNDYTSKKESCVGL

SEQ ID NO: 141 - DNA, 1722 bp, Artificial Sequence
  CDS (1)...(1722): synthetic butyrylcholinesterase variant
gaagatgacatcataattgcaacaaagaatggaaaagtcagagggatgaacttgacagtttttggtggcacggtaacagcctttcttggaattccctatgcacagccacctcttggtagacttcgattcaaaaagccacagtctctgaccaagtggtctgatatttggaatgccacaaaatatgcaaattcttgctgtcagaacatagatcaaagttttccaggcttccatggatcagagatgtggaacccaaacactgacctcagtgaagactgtttatatctaaatgtatggattccagcacctaaaccaaaaaatgccactgtattgatatggatttatggtggtggttttcaaactggaacatcatctttacatgtttatgatggcaagtttctggctcgggttgaaagagttattgtagtgtcaatgaactatagggtgggtgccctaggattcttagctttgccaggaaatcctgaggctccagggaacatgggtttatttgatcaacagttggctcttcagtgggttcaaaaaaatatagcagcctttggtggaaatcctaaaagtgtaactctctttggagaaagtgcaggagcagcttcagttagcctgcatttgctttctcctggaagccattcattgttcaccagagccattctgcaaagtggttccgckaatgctccttgggcggtaacatctctttatgaagctaggaacagaacgttgaacttagctaaattgactggttgctctagagagaatgagactgaaataatcaagtgtcttagaaataaagatccccaagaaattcttctgaatgaagcatttgttgtcccctatgggactcctttgtcagtaaactttggtccgaccgtggatggtgattttctcactgacatgccagacatattacttgaacttggacaatttaaaaaaacccagattttggtgggtgttaataaagatgaagggacagcttttttagtctatggtgctcctggcttcagcaaagataacaatagtatcataactagaaaagaatttcaggaaggtttaaaaatattttttccaggagtgagtgagtttggaaaggaatccatcctttttcattacacagactgggtagatgatcagagacctgaaaactaccgtgaggccttgggtgatgttgttggggattataatttcatatgccctgccttggagttcaccaagaagttctcagaatggggaaataatgcctttttctactattttgaacaccgatcctccaaacttccgtggccagaatggatgtgtgtgatgcatggctatgaaattgaatttgtctttggtttacctctggaaagaagagataattacacaaaagccgaggaaattttgagtagatccatagtgaaacggtgggcaaattttgcaaaatatgggaatccaaatgagactcagaacaatagcacaagctggcctgtcttcaaaagcactgaacaaaaatatctaaccttgaatacagagtcaacaagaataatgacgaaactacgtgctcaacaatgtcgattctggacatcattttttccaaaagtcttggaaatgacaggaaatattgatgaagcagaatgggagtggaaagcaggattccatcgctggaacaattacatgatggactggaaaaatcaatttaacgattacactagcaagaaagaaagttgtgtgggtctc

SEQ ID NO: 142 - protein, 574 aa, Artificial Sequence
  synthetic butyrylcholinesterase variant
  VARIANT 227: Xaa = Ala
EDDIIIATKNGKVRGMNLTVFGGTVTAFLGIPYAQPPLGRLRFKKPQSLTKWSDIWNATKYANSCCQNIDQSFPGFHGSEMWNPNTDLSEDCLYLNVWIPAPKPKNATVLIWIYGGGFQTGTSSLHVYDGKFLARVERVIVVSMNYRVGALGFLALPGNPEAPGNMGLFDQQLALQWVQKNIAAFGGNPKSVTLFGESAGAASVSLHLLSPGSHSLFTRAILQSGSXNAPWAVTSLYEARNRTLNLAKLTGCSRENETEIIKCLRNKDPQEILLNEAFVVPYGTPLSVNFGPTVDGDFLTDMPDILLELGQFKKTQILVGVNKDEGTAFLVYGAPGFSKDNNSIITRKEFQEGLKIFFPGVSEFGKESILFHYTDWVDDQRPENYREALGDVVGDYNFICPALEFTKKFSEWGNNAFFYYFEHRSSKLPWPEWMCVMHGYEIEFVFGLPLERRDNYTKAEEILSRSIVKRWANFAKYGNPNETQNNSTSWPVFKSTEQKYLTLNTESTRIMTKLRAQQCRFWTSFFPKVLEMTGNIDEAEWEWKAGFHRWNNYMMDWKNQFNDYTSKKESCVGL

SEQ ID NO: 143 - DNA, 1722 bp, Artificial Sequence
  CDS (1)...(1722): synthetic butyrylcholinesterase variant
gaagatgacatcataattgcaacaaagaatggaaaagtcagagggatgaacttgacagtttttggtggcacggtaacagcctttcttggaattccctatgcacagccacctcttggtagacttcgattcaaaaagccacagtctctgaccaagtggtctgatatttggaatgccacaaaatatgcaaattcttgctgtcagaacatagatcaaagttttccaggcttccatggatcagagatgtggaacccaaacactgacctcagtgaagactgtttatatctaaatgtatggattccagcacctaaaccaaaaaatgccactgtattgatatggatttatggtggtggttttcaaactggaacatcatctttacatgtttatgatggcaagtttctggctcgggttgaaagagttattgtagtgtcaatgaactatagggtgggtgccctaggattcttagctttgccaggaaatcctgaggctccagggaacatgggtttatttgatcaacagttggctcttcagtgggttcaaaaaaatatagcagcctttggtggaaatcctaaaagtgtaactctctttggagaaagtgcaggagcagcttcagttagcctgcatttgctttctcctggaagccattcattgttcaccagagccattctgcaaagtggttccgckaatgctccttgggcggtaacatctctttatgaagctaggaacagaacgttgaacttagctaaattgactggttgctctagagagaatgagactgaaataatcaagtgtcttagaaataaagatccccaagaaattcttctgaatgaagcatttgttgtcccctatgggactcctttgtcagtaaactttggtccgaccgtggatggtgattttctcactgacatgccagacatattacttgaacttggacaatttaaaaaaacccagattttggtgggtgttaataaagatgaagggacagcttttttagtctatggtgctcctggcttcagcaaagataacaatagtatcataactagaaaagaatttcaggaaggtttaaaaatattttttccaggagtgagtgagtttggaaaggaatccatcctttttcattacacagactgggtagatgatcagagacctgaaaactaccgtgaggccttgggtgatgttgttggggattataatttcatatgccctgccttggagttcaccaagaagttctcagaatggggaaataatgcctttttctactattttgaacaccgatcctccaaacttccgtggccagaatggatgggagtggggcatggctatgaaattgaatttgtctttggtttacctctggaaagaagagataattacacaaaagccgaggaaattttgagtagatccatagtgaaacggtgggcaaattttgcaaaatatgggaatccaaatgagactcagaacaatagcacaagctggcctgtcttcaaaagcactgaacaaaaatatctaaccttgaatacagagtcaacaagaataatgacgaaactacgtgctcaacaatgtcgattctggacatcattttttccaaaagtcttggaaatgacaggaaatattgatgaagcagaatgggagtggaaagcaggattccatcgctggaacaattacatgatggactggaaaaatcaatttaacgattacactagcaagaaagaaagttgtgtgggtctc

SEQ ID NO: 144 - protein, 574 aa, Artificial Sequence
  synthetic butyrylcholinesterase variant
  VARIANT 227: Xaa = Ala
EDDIIIATKNGKVRGMNLTVFGGTVTAFLGIPYAQPPLGRLRFKKPQSLTKWSDIWNATKYANSCCQNIDQSFPGFHGSEMWNPNTDLSEDCLYLNVWIPAPKPKNATVLIWIYGGGFQTGTSSLHVYDGKFLARVERVIVVSMNYRVGALGFLALPGNPEAPGNMGLFDQQLALQWVQKNIAAFGGNPKSVTLFGESAGAASVSLHLLSPGSHSLFTRAILQSGSXNAPWAVTSLYEARNRTLNLAKLTGCSRENETEIIKCLRNKDPQEILLNEAFVVPYGTPLSVNFGPTVDGDFLTDMPDILLELGQFKKTQILVGVNKDEGTAFLVYGAPGFSKDNNSIITRKEFQEGLKIFFPGVSEFGKESILFHYTDWVDDQRPENYREALGDVVGDYNFICPALEFTKKFSEWGNNAFFYYFEHRSSKLPWPEWMGVGHGYEIEFVFGLPLERRDNYTKAEEILSRSIVKRWANFAKYGNPNETQNNSTSWPVFKSTEQKYLTLNTESTRIMTKLRAQQCRFWTSFFPKVLEMTGNIDEAEWEWKAGFHRWNNYMMDWKNQFNDYTSKKESCVGL

SEQ ID NO: 145 - DNA, 1722 bp, Artificial Sequence
  CDS (1)...(1722): synthetic butyrylcholinesterase variant
gaagatgacatcataattgcaacaaagaatggaaaagtcagagggatgaacttgacagtttttggtggcacggtaacagcctttcttggaattccctatgcacagccacctcttggtagacttcgattcaaaaagccacagtctctgaccaagtggtctgatatttggaatgccacaaaatatgcaaattcttgctgtcagaacatagatcaaagttttccaggcttccatggatcagagatgtggaacccaaacactgacctcagtgaagactgtttatatctaaatgtatggattccagcacctaaaccaaaaaatgccactgtattgatatggatttatggtggtggttttcaaactggaacatcatctttacatgtttatgatggcaagtttctggctcgggttgaaagagttattgtagtgtcaatgaactatagggtgggtgccctaggattcttagctttgccaggaaatcctgaggctccagggaacatgggtttatttgatcaacagttggctcttcagtgggttcaaaaaaatatagcagcctttggtggaaatcctaaaagtgtaactctctttggagaaagtgcaggagcagcttcagttagcctgcatttgctttctcctggaagccattcattgttcaccagagccattctgcaaagtggttccgckaatgctccttgggcggtaacatctctttatgaagctaggaacagaacgttgaacttagctaaattgactggttgctctagagagaatgagactgaaataatcaagtgtcttagaaataaagatccccaagaaattcttctgaatgaagcatttgttgtcccctatgggactcctttgtcagtaaactttggtccgaccgtggatggtgattttctcactgacatgccagacatattacttgaacttggacaatttaaaaaaacccagattttggtgggtgttaataaagatgaagggacagcttttttagtctatggtgctcctggcttcagcaaagataacaatagtatcataactagaaaagaatttcaggaaggtttaaaaatattttttccaggagtgagtgagtttggaaaggaatccatcctttttcattacacagactgggtagatgatcagagacctgaaaactaccgtgaggccttgggtgatgttgttggggattataatttcatatgccctgccttggagttcaccaagaagttctcagaatggggaaataatgcctttttctactattttgaacaccgatcctccaaacttccgtggccagaatggatgggagtgattcatggctatgaaattgaatttgtctttggtttacctctggaaagaagagataattacacaaaagccgaggaaattttgagtagatccatagtgaaacggtgggcaaattttgcaaaatatgggaatccaaatgagactcagaacaatagcacaagctggcctgtcttcaaaagcactgaacaaaaatatctaaccttgaatacagagtcaacaagaataatgacgaaactacgtgctcaacaatgtcgattctggacatcattttttccaaaagtcttggaaatgacaggaaatattgatgaagcagaatgggagtggaaagcaggattccatcgctggaacaattacatgatggactggaaaaatcaatttaacgattacactagcaagaaagaaagttgtgtgggtctc

SEQ ID NO: 146 - protein, 574 aa, Artificial Sequence
  synthetic butyrylcholinesterase variant
  VARIANT 227: Xaa = Ala
EDDIIIATKNGKVRGMNLTVFGGTVTAFLGIPYAQPPLGRLRFKKPQSLTKWSDIWNATKYANSCCQNIDQSFPGFHGSEMWNPNTDLSEDCLYLNVWIPAPKPKNATVLIWIYGGGFQTGTSSLHVYDGKFLARVERVIVVSMNYRVGALGFLALPGNPEAPGNMGLFDQQLALQWVQKNIAAFGGNPKSVTLFGESAGAASVSLHLLSPGSHSLFTRAILQSGSXNAPWAVTSLYEARNRTLNLAKLTGCSRENETEIIKCLRNKDPQEILLNEAFVVPYGTPLSVNFGPTVDGDFLTDMPDILLELGQFKKTQILVGVNKDEGTAFLVYGAPGFSKDNNSIITRKEFQEGLKIFFPGVSEFGKESILFHYTDWVDDQRPENYREALGDVVGDYNFICPALEFTKKFSEWGNNAFFYYFEHRSSKLPWPEWMGVIHGYEIEFVFGLPLERRDNYTKAEEILSRSIVKRWANFAKYGNPNETQNNSTSWPVFKSTEQKYLTLNTESTRIMTKLRAQQCRFWTSFFPKVLEMTGNIDEAEWEWKAGFHRWNNYMMDWKNQFNDYTSKKESCVGL

SEQ ID NO: 147 - DNA, 1722 bp, Artificial Sequence
  CDS (1)...(1722): synthetic butyrylcholinesterase variant
gaagatgacatcataattgcaacaaagaatggaaaagtcagagggatgaacttgacagtttttggtggcacggtaacagcctttcttggaattccctatgcacagccacctcttggtagacttcgattcaaaaagccacagtctctgaccaagtggtctgatatttggaatgccacaaaatatgcaaattcttgctgtcagaacatagatcaaagttttccaggcttccatggatcagagatgtggaacccaaacactgacctcagtgaagactgtttatatctaaatgtatggattccagcacctaaaccaaaaaatgccactgtattgatatggatttatggtggtggttttcaaactggaacatcatctttacatgtttatgatggcaagtttctggctcgggttgaaagagttattgtagtgtcaatgaactatagggtgggtgccctaggattcttagctttgccaggaaatcctgaggctccagggaacatgggtttatttgatcaacagttggctcttcagtgggttcaaaaaaatatagcagcctttggtggaaatcctaaaagtgtaactctctttggagaaagtgcaggagcagcttcagttagcctgcatttgctttctcctggaagccattcattgttcaccagagccattctgcaaagtggttccgckaatgctccttgggcggtaacatctctttatgaagctaggaacagaacgttgaacttagctaaattgactggttgctctagagagaatgagactgaaataatcaagtgtcttagaaataaagatccccaagaaattcttctgaatgaagcatttgttgtcccctatgggactcctttgtcagtaaactttggtccgaccgtggatggtgattttctcactgacatgccagacatattacttgaacttggacaatttaaaaaaacccagattttggtgggtgttaataaagatgaagggacagcttttttagtctatggtgctcctggcttcagcaaagataacaatagtatcataactagaaaagaatttcaggaaggtttaaaaatattttttccaggagtgagtgagtttggaaaggaatccatcctttttcattacacagactgggtagatgatcagagacctgaaaactaccgtgaggccttgggtgatgttgttggggattataatttcatatgccctgccttggagttcaccaagaagttctcagaatggggaaataatgcctttttctactattttgaacaccgatcctccaaacttccgtggccagaatggatgggagtgatgcatacgtatgaaattgaatttgtctttggtttacctctggaaagaagagataattacacaaaagccgaggaaattttgagtagatccatagtgaaacggtgggcaaattttgcaaaatatgggaatccaaatgagactcagaacaatagcacaagctggcctgtcttcaaaagcactgaacaaaaatatctaaccttgaatacagagtcaacaagaataatgacgaaactacgtgctcaacaatgtcgattctggacatcattttttccaaaagtcttggaaatgacaggaaatattgatgaagcagaatgggagtggaaagcaggattccatcgctggaacaattacatgatggactggaaaaatcaatttaacgattacactagcaagaaagaaagttgtgtgggtctc

SEQ ID NO: 148 - protein, 574 aa, Artificial Sequence
  synthetic butyrylcholinesterase variant
  VARIANT 227: Xaa = Ala
EDDIIIATKNGKVRGMNLTVFGGTVTAFLGIPYAQPPLGRLRFKKPQSLTKWSDIWNATKYANSCCQNIDQSFPGFHGSEMWNPNTDLSEDCLYLNVWIPAPKPKNATVLIWIYGGGFQTGTSSLHVYDGKFLARVERVIVVSMNYRVGALGFLALPGNPEAPGNMGLFDQQLALQWVQKNIAAFGGNPKSVTLFGESAGAASVSLHLLSPGSHSLFTRAILQSGSXNAPWAVTSLYEARNRTLNLAKLTGCSRENETEIIKCLRNKDPQEILLNEAFVVPYGTPLSVNFGPTVDGDFLTDMPDILLELGQFKKTQILVGVNKDEGTAFLVYGAPGFSKDNNSIITRKEFQEGLKIFFPGVSEFGKESILFHYTDWVDDQRPENYREALGDVVGDYNFICPALEFTKKFSEWGNNAFFYYFEHRSSKLPWPEWMGVMHTYEIEFVFGLPLERRDNYTKAEEILSRSIVKRWANFAKYGNPNETQNNSTSWPVFKSTEQKYLTLNTESTRIMTKLRAQQCRFWTSFFPKVLEMTGNIDEAEWEWKAGFHRWNNYMMDWKNQFNDYTSKKESCVGL

SEQ ID NO: 149 - DNA, 1722 bp, Artificial Sequence
  CDS (1)...(1722): synthetic butyrylcholinesterase variant
gaagatgacatcataattgcaacaaagaatggaaaagtcagagggatgaacttgacagtttttggtggcacggtaacagcctttcttggaattccctatgcacagccacctcttggtagacttcgattcaaaaagccacagtctctgaccaagtggtctgatatttggaatgccacaaaatatgcaaattcttgctgtcagaacatagatcaaagttttccaggcttccatggatcagagatgtggaacccaaacactgacctcagtgaagactgtttatatctaaatgtatggattccagcacctaaaccaaaaaatgccactgtattgatatggatttatggtggtggttttcaaactggaacatcatctttacatgtttatgatggcaagtttctggctcgggttgaaagagttattgtagtgtcaatgaactatagggtgggtgccctaggattcttagctttgccaggaaatcctgaggctccagggaacatgggtttatttgatcaacagttggctcttcagtgggttcaaaaaaatatagcagcctttggtggaaatcctaaaagtgtaactctctttggagaaagtgcaggagcagcttcagttagcctgcatttgctttctcctggaagccattcattgttcaccagagccattctgcaaagtggttccgckaatgctccttgggcggtaacatctctttatgaagctaggaacagaacgttgaacttagctaaattgactggttgctctagagagaatgagactgaaataatcaagtgtcttagaaataaagatccccaagaaattcttctgaatgaagcatttgttgtcccctatgggactcctttgtcagtaaactttggtccgaccgtggatggtgattttctcactgacatgccagacatattacttgaacttggacaatttaaaaaaacccagattttggtgggtgttaataaagatgaagggacagcttttttagtctatggtgctcctggcttcagcaaagataacaatagtatcataactagaaaagaatttcaggaaggtttaaaaatattttttccaggagtgagtgagtttggaaaggaatccatcctttttcattacacagactgggtagatgatcagagacctgaaaactaccgtgaggccttgggtgatgttgttggggattataatttcatatgccctgccttggagttcaccaagaagttctcagaatggggaaataatgcctttttctactattttgaacaccgatcctccaaacttccgtggccagaatggatgggagtgatgcatggcgctgaaattgaatttgtctttggtttacctctggaaagaagagataattacacaaaagccgaggaaattttgagtagatccatagtgaaacggtgggcaaattttgcaaaatatgggaatccaaatgagactcagaacaatagcacaagctggcctgtcttcaaaagcactgaacaaaaatatctaaccttgaatacagagtcaacaagaataatgacgaaactacgtgctcaacaatgtcgattctggacatcattttttccaaaagtcttggaaatgacaggaaatattgatgaagcagaatgggagtggaaagcaggattccatcgctggaacaattacatgatggactggaaaaatcaatttaacgattacactagcaagaaagaaagttgtgtgggtctc

SEQ ID NO: 150 - protein, 574 aa, Artificial Sequence
  synthetic butyrylcholinesterase variant
  VARIANT 227: Xaa = Ala
EDDIIIATKNGKVRGMNLTVFGGTVTAFLGIPYAQPPLGRLRFKKPQSLTKWSDIWNATKYANSCCQNIDQSFPGFHGSEMWNPNTDLSEDCLYLNVWIPAPKPKNATVLIWIYGGGFQTGTSSLHVYDGKFLARVERVIVVSMNYRVGALGFLALPGNPEAPGNMGLFDQQLALQWVQKNIAAFGGNPKSVTLFGESAGAASVSLHLLSPGSHSLFTRAILQSGSXNAPWAVTSLYEARNRTLNLAKLTGCSRENETEIIKCLRNKDPQEILLNEAFVVPYGTPLSVNFGPTVDGDFLTDMPDILLELGQFKKTQILVGVNKDEGTAFLVYGAPGFSKDNNSIITRKEFQEGLKIFFPGVSEFGKESILFHYTDWVDDQRPENYREALGDVVGDYNFICPALEFTKKFSEWGNNAFFYYFEHRSSKLPWPEWMGVMHGAEIEFVFGLPLERRDNYTKAEEILSRSIVKRWANFAKYGNPNETQNNSTSWPVFKSTEQKYLTLNTESTRIMTKLRAQQCRFWTSFFPKVLEMTGNIDEAEWEWKAGFHRWNNYMMDWKNQFNDYTSKKESCVGL

SEQ ID NO: 151 - DNA, 1722 bp, Artificial Sequence
  CDS (1)...(1722): synthetic butyrylcholinesterase variant
gaagatgacatcataattgcaacaaagaatggaaaagtcagagggatgaacttgacagtttttggtggcacggtaacagcctttcttggaattccctatgcacagccacctcttggtagacttcgattcaaaaagccacagtctctgaccaagtggtctgatatttggaatgccacaaaatatgcaaattcttgctgtcagaacatagatcaaagttttccaggcttccatggatcagagatgtggaacccaaacactgacctcagtgaagactgtttatatctaaatgtatggattccagcacctaaaccaaaaaatgccactgtattgatatggatttatggtggtggttttcaaactggaacatcatctttacatgtttatgatggcaagtttctggctcgggttgaaagagttattgtagtgtcaatgaactatagggtgggtgccctaggattcttagctttgccaggaaatcctgaggctccagggaacatgggtttatttgatcaacagttggctcttcagtgggttcaaaaaaatatagcagcctttggtggaaatcctaaaagtgtaactctctttggagaaagtgcaggagcagcttcagttagcctgcatttgctttctcctggaagccattcattgttcaccagagccattctgcaaagtggttccgckaatgctccttgggcggtaacatctctttatgaagctaggaacagaacgttgaacttagctaaattgactggttgctctagagagaatgagactgaaataatcaagtgtcttagaaataaagatccccaagaaattcttctgaatgaagcatttgttgtcccctatgggactcctttgtcagtaaactttggtccgaccgtggatggtgattttctcactgacatgccagacatattacttgaacttggacaatttaaaaaaacccagattttggtgggtgttaataaagatgaagggacagcttttttagtctatggtgctcctggcttcagcaaagataacaatagtatcataactagaaaagaatttcaggaaggtttaaaaatattttttccaggagtgagtgagtttggaaaggaatccatcctttttcattacacagactgggtagatgatcagagacctgaaaactaccgtgaggccttgggtgatgttgttggggattataatttcatatgccctgccttggagttcaccaagaagttctcagaatggggaaataatgcctttttctactattttgaacaccgatcctccaaacttccgtggccagaatggatgggagtgatgcatggcgaggaaattgaatttgtctttggtttacctctggaaagaagagataattacacaaaagccgaggaaattttgagtagatccatagtgaaacggtgggcaaattttgcaaaatatgggaatccaaatgagactcagaacaatagcacaagctggcctgtcttcaaaagcactgaacaaaaatatctaaccttgaatacagagtcaacaagaataatgacgaaactacgtgctcaacaatgtcgattctggacatcattttttccaaaagtcttggaaatgacaggaaatattgatgaagcagaatgggagtggaaagcaggattccatcgctggaacaattacatgatggactggaaaaatcaatttaacgattacactagcaagaaagaaagttgtgtgggtctc

SEQ ID NO: 152 - protein, 574 aa, Artificial Sequence
  synthetic butyrylcholinesterase variant
  VARIANT 227: Xaa = Ala
EDDIIIATKNGKVRGMNLTVFGGTVTAFLGIPYAQPPLGRLRFKKPQSLTKWSDIWNATKYANSCCQNIDQSFPGFHGSEMWNPNTDLSEDCLYLNVWIPAPKPKNATVLIWIYGGGFQTGTSSLHVYDGKFLARVERVIVVSMNYRVGALGFLALPGNPEAPGNMGLFDQQLALQWVQKNIAAFGGNPKSVTLFGESAGAASVSLHLLSPGSHSLFTRAILQSGSXNAPWAVTSLYEARNRTLNLAKLTGCSRENETEIIKCLRNKDPQEILLNEAFVVPYGTPLSVNFGPTVDGDFLTDMPDILLELGQFKKTQILVGVNKDEGTAFLVYGAPGFSKDNNSIITRKEFQEGLKIFFPGVSEFGKESILFHYTDWVDDQRPENYREALGDVVGDYNFICPALEFTKKFSEWGNNAFFYYFEHRSSKLPWPEWMGVMHGEEIEFVFGLPLERRDNYTKAEEILSRSIVKRWANFAKYGNPNETQNNSTSWPVFKSTEQKYLTLNTESTRIMTKLRAQQCRFWTSFFPKVLEMTGNIDEAEWEWKAGFHRWNNYMMDWKNQFNDYTSKKESCVGL

SEQ ID NO: 153 - DNA, 1722 bp, Artificial Sequence
  CDS (1)...(1722): synthetic butyrylcholinesterase variant
gaagatgacatcataattgcaacaaagaatggaaaagtcagagggatgaacttgacagtttttggtggcacggtaacagcctttcttggaattccctatgcacagccacctcttggtagacttcgattcaaaaagccacagtctctgaccaagtggtctgatatttggaatgccacaaaatatgcaaattcttgctgtcagaacatagatcaaagttttccaggcttccatggatcagagatgtggaacccaaacactgacctcagtgaagactgtttatatctaaatgtatggattccagcacctaaaccaaaaaatgccactgtattgatatggatttatggtggtggttttcaaactggaacatcatctttacatgtttatgatggcaagtttctggctcgggttgaaagagttattgtagtgtcaatgaactatagggtgggtgccctaggattcttagctttgccaggaaatcctgaggctccagggaacatgggtttatttgatcaacagttggctcttcagtgggttcaaaaaaatatagcagcctttggtggaaatcctaaaagtgtaactctctttggagaaagtgcaggagcagcttcagttagcctgcatttgctttctcctggaagccattcattgttcaccagagccattctgcaaagtggttccgckaatgctccttgggcggtaacatctctttatgaagctaggaacagaacgttgaacttagctaaattgactggttgctctagagagaatgagactgaaataatcaagtgtcttagaaataaagatccccaagaaattcttctgaatgaagcatttgttgtcccctatgggactcctttgtcagtaaactttggtccgaccgtggatggtgattttctcactgacatgccagacatattacttgaacttggacaatttaaaaaaacccagattttggtgggtgttaataaagatgaagggacagcttttttagtctatggtgctcctggcttcagcaaagataacaatagtatcataactagaaaagaatttcaggaaggtttaaaaatattttttccaggagtgagtgagtttggaaaggaatccatcctttttcattacacagactgggtagatgatcagagacctgaaaactaccgtgaggccttgggtgatgttgttggggattataatttcatatgccctgccttggagttcaccaagaagttctcagaatggggaaataatgcctttttctactattttgaacaccgatcctccaaacttccgtggccagaatggatgggagtgatgcatggctttgaaattgaatttgtctttggtttacctctggaaagaagagataattacacaaaagccgaggaaattttgagtagatccatagtgaaacggtgggcaaattttgcaaaatatgggaatccaaatgagactcagaacaatagcacaagctggcctgtcttcaaaagcactgaacaaaaatatctaaccttgaatacagagtcaacaagaataatgacgaaactacgtgctcaacaatgtcgattctggacatcattttttccaaaagtcttggaaatgacaggaaatattgatgaagcagaatgggagtggaaagcaggattccatcgctggaacaattacatgatggactggaaaaatcaatttaacgattacactagcaagaaagaaagttgtgtgggtctc

SEQ ID NO: 154 - protein, 574 aa, Artificial Sequence
  synthetic butyrylcholinesterase variant
  VARIANT 227: Xaa = Ala
EDDIIIATKNGKVRGMNLTVFGGTVTAFLGIPYAQPPLGRLRFKKPQSLTKWSDIWNATKYANSCCQNIDQSFPGFHGSEMWNPNTDLSEDCLYLNVWIPAPKPKNATVLIWIYGGGFQTGTSSLHVYDGKFLARVERVIVVSMNYRVGALGFLALPGNPEAPGNMGLFDQQLALQWVQKNIAAFGGNPKSVTLFGESAGAASVSLHLLSPGSHSLFTRAILQSGSXNAPWAVTSLYEARNRTLNLAKLTGCSRENETEIIKCLRNKDPQEILLNEAFVVPYGTPLSVNFGPTVDGDFLTDMPDILLELGQFKKTQILVGVNKDEGTAFLVYGAPGFSKDNNSIITRKEFQEGLKIFFPGVSEFGKESILFHYTDWVDDQRPENYREALGDVVGDYNFICPALEFTKKFSEWGNNAFFYYFEHRSSKLPWPEWMGVMHGFEIEFVFGLPLERRDNYTKAEEILSRSIVKRWANFAKYGNPNETQNNSTSWPVFKSTEQKYLTLNTESTRIMTKLRAQQCRFWTSFFPKVLEMTGNIDEAEWEWKAGFHRWNNYMMDWKNQFNDYTSKKESCVGL

SEQ ID NO: 155 - DNA, 1722 bp, Artificial Sequence
  CDS (1)...(1722): synthetic butyrylcholinesterase variant
gaagatgacatcataattgcaacaaagaatggaaaagtcagagggatgaacttgacagtttttggtggcacggtaacagcctttcttggaattccctatgcacagccacctcttggtagacttcgattcaaaaagccacagtctctgaccaagtggtctgatatttggaatgccacaaaatatgcaaattcttgctgtcagaacatagatcaaagttttccaggcttccatggatcagagatgtggaacccaaacactgacctcagtgaagactgtttatatctaaatgtatggattccagcacctaaaccaaaaaatgccactgtattgatatggatttatggtggtggttttcaaactggaacatcatctttacatgtttatgatggcaagtttctggctcgggttgaaagagttattgtagtgtcaatgaactatagggtgggtgccctaggattcttagctttgccaggaaatcctgaggctccagggaacatgggtttatttgatcaacagttggctcttcagtgggttcaaaaaaatatagcagcctttggtggaaatcctaaaagtgtaactctctttggagaaagtgcaggagcagcttcagttagcctgcatttgctttctcctggaagccattcattgttcaccagagccattctgcaaagtggttccgckaatgctccttgggcggtaacatctctttatgaagctaggaacagaacgttgaacttagctaaattgactggttgctctagagagaatgagactgaaataatcaagtgtcttagaaataaagatccccaagaaattcttctgaatgaagcatttgttgtcccctatgggactcctttgtcagtaaactttggtccgaccgtggatggtgattttctcactgacatgccagacatattacttgaacttggacaatttaaaaaaacccagattttggtgggtgttaataaagatgaagggacagcttttttagtctatggtgctcctggcttcagcaaagataacaatagtatcataactagaaaagaatttcaggaaggtttaaaaatattttttccaggagtgagtgagtttggaaaggaatccatcctttttcattacacagactgggtagatgatcagagacctgaaaactaccgtgaggccttgggtgatgttgttggggattataatttcatatgccctgccttggagttcaccaagaagttctcagaatggggaaataatgcctttttctactattttgaacaccgatcctccaaacttccgtggccagaatggatgggagtgatgcatggcggtgaaattgaatttgtctttggtttacctctggaaagaagagataattacacaaaagccgaggaaattttgagtagatccatagtgaaacggtgggcaaattttgcaaaatatgggaatccaaatgagactcagaacaatagcacaagctggcctgtcttcaaaagcactgaacaaaaatatctaaccttgaatacagagtcaacaagaataatgacgaaactacgtgctcaacaatgtcgattctggacatcattttttccaaaagtcttggaaatgacaggaaatattgatgaagcagaatgggagtggaaagcaggattccatcgctggaacaattacatgatggactggaaaaatcaatttaacgattacactagcaagaaagaaagttgtgtgggtctc

SEQ ID NO: 156 - protein, 574 aa, Artificial Sequence
  synthetic butyrylcholinesterase variant
  VARIANT 227: Xaa = Ala
EDDIIIATKNGKVRGMNLTVFGGTVTAFLGIPYAQPPLGRLRFKKPQSLTKWSDIWNATKYANSCCQNIDQSFPGFHGSEMWNPNTDLSEDCLYLNVWIPAPKPKNATVLIWIYGGGFQTGTSSLHVYDGKFLARVERVIVVSMNYRVGALGFLALPGNPEAPGNMGLFDQQLALQWVQKNIAAFGGNPKSVTLFGESAGAASVSLHLLSPGSHSLFTRAILQSGSXNAPWAVTSLYEARNRTLNLAKLTGCSRENETEIIKCLRNKDPQEILLNEAFVVPYGTPLSVNFGPTVDGDFLTDMPDILLELGQFKKTQILVGVNKDEGTAFLVYGAPGFSKDNNSIITRKEFQEGLKIFFPGVSEFGKESILFHYTDWVDDQRPENYREALGDVVGDYNFICPALEFTKKFSEWGNNAFFYYFEHRSSKLPWPEWMGVMHGGEIEFVFGLPLERRDNYTKAEEILSRSIVKRWANFAKYGNPNETQNNSTSWPVFKSTEQKYLTLNTESTRIMTKLRAQQCRFWTSFFPKVLEMTGNIDEAEWEWKAGFHRWNNYMMDWKNQFNDYTSKKESCVGL

SEQ ID NO: 157 - DNA, 1722 bp, Artificial Sequence
  CDS (1)...(1722): synthetic butyrylcholinesterase variant
gaagatgacatcataattgcaacaaagaatggaaaagtcagagggatgaacttgacagtttttggtggcacggtaacagcctttcttggaattccctatgcacagccacctcttggtagacttcgattcaaaaagccacagtctctgaccaagtggtctgatatttggaatgccacaaaatatgcaaattcttgctgtcagaacatagatcaaagttttccaggcttccatggatcagagatgtggaacccaaacactgacctcagtgaagactgtttatatctaaatgtatggattccagcacctaaaccaaaaaatgccactgtattgatatggatttatggtggtggttttcaaactggaacatcatctttacatgtttatgatggcaagtttctggctcgggttgaaagagttattgtagtgtcaatgaactatagggtgggtgccctaggattcttagctttgccaggaaatcctgaggctccagggaacatgggtttatttgatcaacagttggctcttcagtgggttcaaaaaaatatagcagcctttggtggaaatcctaaaagtgtaactctctttggagaaagtgcaggagcagcttcagttagcctgcatttgctttctcctggaagccattcattgttcaccagagccattctgcaaagtggttccgckaatgctccttgggcggtaacatctctttatgaagctaggaacagaacgttgaacttagctaaattgactggttgctctagagagaatgagactgaaataatcaagtgtcttagaaataaagatccccaagaaattcttctgaatgaagcatttgttgtcccctatgggactcctttgtcagtaaactttggtccgaccgtggatggtgattttctcactgacatgccagacatattacttgaacttggacaatttaaaaaaacccagattttggtgggtgttaataaagatgaagggacagcttttttagtctatggtgctcctggcttcagcaaagataacaatagtatcataactagaaaagaatttcaggaaggtttaaaaatattttttccaggagtgagtgagtttggaaaggaatccatcctttttcattacacagactgggtagatgatcagagacctgaaaactaccgtgaggccttgggtgatgttgttggggattataatttcatatgccctgccttggagttcaccaagaagttctcagaatggggaaataatgcctttttctactattttgaacaccgatcctccaaacttccgtggccagaatggatgggagtgatgcatggccatgaaattgaatttgtctttggtttacctctggaaagaagagataattacacaaaagccgaggaaattttgagtagatccatagtgaaacggtgggcaaattttgcaaaatatgggaatccaaatgagactcagaacaatagcacaagctggcctgtcttcaaaagcactgaacaaaaatatctaaccttgaatacagagtcaacaagaataatgacgaaactacgtgctcaacaatgtcgattctggacatcattttttccaaaagtcttggaaatgacaggaaatattgatgaagcagaatgggagtggaaagcaggattccatcgctggaacaattacatgatggactggaaaaatcaatttaacgattacactagcaagaaagaaagttgtgtgggtctc

SEQ ID NO: 158 - protein, 574 aa, Artificial Sequence
  synthetic butyrylcholinesterase variant
  VARIANT 227: Xaa = Ala
EDDIIIATKNGKVRGMNLTVFGGTVTAFLGIPYAQPPLGRLRFKKPQSLTKWSDIWNATKYANSCCQNIDQSFPGFHGSEMWNPNTDLSEDCLYLNVWIPAPKPKNATVLIWIYGGGFQTGTSSLHVYDGKFLARVERVIVVSMNYRVGALGFLALPGNPEAPGNMGLFDQQLALQWVQKNIAAFGGNPKSVTLFGESAGAASVSLHLLSPGSHSLFTRAILQSGSXNAPWAVTSLYEARNRTLNLAKLTGCSRENETEIIKCLRNKDPQEILLNEAFVVPYGTPLSVNFGPTVDGDFLTDMPDILLELGQFKKTQILVGVNKDEGTAFLVYGAPGFSKDNNSIITRKEFQEGLKIFFPGVSEFGKESILFHYTDWVDDQRPENYREALGDVVGDYNFICPALEFTKKFSEWGNNAFFYYFEHRSSKLPWPEWMGVMHGHEIEFVFGLPLERRDNYTKAEEILSRSIVKRWANFAKYGNPNETQNNSTSWPVFKSTEQKYLTLNTESTRIMTKLRAQQCRFWTSFFPKVLEMTGNIDEAEWEWKAGFHRWNNYMMDWKNQFNDYTSKKESCVGL

SEQ ID NO: 159 - DNA, 1722 bp, Artificial Sequence
  CDS (1)...(1722): synthetic butyrylcholinesterase variant
gaagatgacatcataattgcaacaaagaatggaaaagtcagagggatgaacttgacagtttttggtggcacggtaacagcctttcttggaattccctatgcacagccacctcttggtagacttcgattcaaaaagccacagtctctgaccaagtggtctgatatttggaatgccacaaaatatgcaaattcttgctgtcagaacatagatcaaagttttccaggcttccatggatcagagatgtggaacccaaacactgacctcagtgaagactgtttatatctaaatgtatggattccagcacctaaaccaaaaaatgccactgtattgatatggatttatggtggtggttttcaaactggaacatcatctttacatgtttatgatggcaagtttctggctcgggttgaaagagttattgtagtgtcaatgaactatagggtgggtgccctaggattcttagctttgccaggaaatcctgaggctccagggaacatgggtttatttgatcaacagttggctcttcagtgggttcaaaaaaatatagcagcctttggtggaaatcctaaaagtgtaactctctttggagaaagtgcaggagcagcttcagttagcctgcatttgctttctcctggaagccattcattgttcaccagagccattctgcaaagtggttccgckaatgctccttgggcggtaacatctctttatgaagctaggaacagaacgttgaacttagctaaattgactggttgctctagagagaatgagactgaaataatcaagtgtcttagaaataaagatccccaagaaattcttctgaatgaagcatttgttgtcccctatgggactcctttgtcagtaaactttggtccgaccgtggatggtgattttctcactgacatgccagacatattacttgaacttggacaatttaaaaaaacccagattttggtgggtgttaataaagatgaagggacagcttttttagtctatggtgctcctggcttcagcaaagataacaatagtatcataactagaaaagaatttcaggaaggtttaaaaatattttttccaggagtgagtgagtttggaaaggaatccatcctttttcattacacagactgggtagatgatcagagacctgaaaactaccgtgaggccttgggtgatgttgttggggattataatttcatatgccctgccttggagttcaccaagaagttctcagaatggggaaataatgcctttttctactattttgaacaccgatcctccaaacttccgtggccagaatggatgggagtgatgcatggcttggaaattgaatttgtctttggtttacctctggaaagaagagataattacacaaaagccgaggaaattttgagtagatccatagtgaaacggtgggcaaattttgcaaaatatgggaatccaaatgagactcagaacaatagcacaagctggcctgtcttcaaaagcactgaacaaaaatatctaaccttgaatacagagtcaacaagaataatgacgaaactacgtgctcaacaatgtcgattctggacatcattttttccaaaagtcttggaaatgacaggaaatattgatgaagcagaatgggagtggaaagcaggattccatcgctggaacaattacatgatggactggaaaaatcaatttaacgattacactagcaagaaagaaagttgtgtgggtctc

SEQ ID NO: 160 - protein, 574 aa, Artificial Sequence
  synthetic butyrylcholinesterase variant
  VARIANT 227: Xaa = Ala
EDDIIIATKNGKVRGMNLTVFGGTVTAFLGIPYAQPPLGRLRFKKPQSLTKWSDIWNATKYANSCCQNIDQSFPGFHGSEMWNPNTDLSEDCLYLNVWIPAPKPKNATVLIWIYGGGFQTGTSSLHVYDGKFLARVERVIVVSMNYRVGALGFLALPGNPEAPGNMGLFDQQLALQWVQKNIAAFGGNPKSVTLFGESAGAASVSLHLLSPGSHSLFTRAILQSGSXNAPWAVTSLYEARNRTLNLAKLTGCSRENETEIIKCLRNKDPQEILLNEAFVVPYGTPLSVNFGPTVDGDFLTDMPDILLELGQFKKTQILVGVNKDEGTAFLVYGAPGFSKDNNSIITRKEFQEGLKIFFPGVSEFGKESILFHYTDWVDDQRPENYREALGDVVGDYNFICPALEFTKKFSEWGNNAFFYYFEHRSSKLPWPEWMGVMHGLEIEFVFGLPLERRDNYTKAEEILSRSIVKRWANFAKYGNPNETQNNSTSWPVFKSTEQKYLTLNTESTRIMTKLRAQQCRFWTSFFPKVLEMTGNIDEAEWEWKAGFHRWNNYMMDWKNQFNDYTSKKESCVGL

SEQ ID NO: 161 - DNA, 1722 bp, Artificial Sequence
  CDS (1)...(1722): synthetic butyrylcholinesterase variant
gaagatgacatcataattgcaacaaagaatggaaaagtcagagggatgaacttgacagtttttggtggcacggtaacagcctttcttggaattccctatgcacagccacctcttggtagacttcgattcaaaaagccacagtctctgaccaagtggtctgatatttggaatgccacaaaatatgcaaattcttgctgtcagaacatagatcaaagttttccaggcttccatggatcagagatgtggaacccaaacactgacctcagtgaagactgtttatatctaaatgtatggattccagcacctaaaccaaaaaatgccactgtattgatatggatttatggtggtggttttcaaactggaacatcatctttacatgtttatgatggcaagtttctggctcgggttgaaagagttattgtagtgtcaatgaactatagggtgggtgccctaggattcttagctttgccaggaaatcctgaggctccagggaacatgggtttatttgatcaacagttggctcttcagtgggttcaaaaaaatatagcagcctttggtggaaatcctaaaagtgtaactctctttggagaaagtgcaggagcagcttcagttagcctgcatttgctttctcctggaagccattcattgttcaccagagccattctgcaaagtggttccgckaatgctccttgggcggtaacatctctttatgaagctaggaacagaacgttgaacttagctaaattgactggttgctctagagagaatgagactgaaataatcaagtgtcttagaaataaagatccccaagaaattcttctgaatgaagcatttgttgtcccctatgggactcctttgtcagtaaactttggtccgaccgtggatggtgattttctcactgacatgccagacatattacttgaacttggacaatttaaaaaaacccagattttggtgggtgttaataaagatgaagggacagcttttttagtctatggtgctcctggcttcagcaaagataacaatagtatcataactagaaaagaatttcaggaaggtttaaaaatattttttccaggagtgagtgagtttggaaaggaatccatcctttttcattacacagactgggtagatgatcagagacctgaaaactaccgtgaggccttgggtgatgttgttggggattataatttcatatgccctgccttggagttcaccaagaagttctcagaatggggaaataatgcctttttctactattttgaacaccgatcctccaaacttccgtggccagaatggatgggagtgatgcatggcatggaaattgaatttgtctttggtttacctctggaaagaagagataattacacaaaagccgaggaaattttgagtagatccatagtgaaacggtgggcaaattttgcaaaatatgggaatccaaatgagactcagaacaatagcacaagctggcctgtcttcaaaagcactgaacaaaaatatctaaccttgaatacagagtcaacaagaataatgacgaaactacgtgctcaacaatgtcgattctggacatcattttttccaaaagtcttggaaatgacaggaaatattgatgaagcagaatgggagtggaaagcaggattccatcgctggaacaattacatgatggactggaaaaatcaatttaacgattacactagcaagaaagaaagttgtgtgggtctc

SEQ ID NO: 162 - protein, 574 aa, Artificial Sequence
  synthetic butyrylcholinesterase variant
  VARIANT 227: Xaa = Ala
EDDIIIATKNGKVRGMNLTVFGGTVTAFLGIPYAQPPLGRLRFKKPQSLTKWSDIWNATKYANSCCQNIDQSFPGFHGSEMWNPNTDLSEDCLYLNVWIPAPKPKNATVLIWIYGGGFQTGTSSLHVYDGKFLARVERVIVVSMNYRVGALGFLALPGNPEAPGNMGLFDQQLALQWVQKNIAAFGGNPKSVTLFGESAGAASVSLHLLSPGSHSLFTRAILQSGSXNAPWAVTSLYEARNRTLNLAKLTGCSRENETEIIKCLRNKDPQEILLNEAFVVPYGTPLSVNFGPTVDGDFLTDMPDILLELGQFKKTQILVGVNKDEGTAFLVYGAPGFSKDNNSIITRKEFQEGLKIFFPGVSEFGKESILFHYTDWVDDQRPENYREALGDVVGDYNFICPALEFTKKFSEWGNNAFFYYFEHRSSKLPWPEWMGVMHGMEIEFVFGLPLERRDNYTKAEEILSRSIVKRWANFAKYGNPNETQNNSTSWPVFKSTEQKYLTLNTESTRIMTKLRAQQCRFWTSFFPKVLEMTGNIDEAEWEWKAGFHRWNNYMMDWKNQFNDYTSKKESCVGL

SEQ ID NO: 163 - DNA, 1722 bp, Artificial Sequence
  CDS (1)...(1722): synthetic butyrylcholinesterase variant
gaagatgacatcataattgcaacaaagaatggaaaagtcagagggatgaacttgacagtttttggtggcacggtaacagcctttcttggaattccctatgcacagccacctcttggtagacttcgattcaaaaagccacagtctctgaccaagtggtctgatatttggaatgccacaaaatatgcaaattcttgctgtcagaacatagatcaaagttttccaggcttccatggatcagagatgtggaacccaaacactgacctcagtgaagactgtttatatctaaatgtatggattccagcacctaaaccaaaaaatgccactgtattgatatggatttatggtggtggttttcaaactggaacatcatctttacatgtttatgatggcaagtttctggctcgggttgaaagagttattgtagtgtcaatgaactatagggtgggtgccctaggattcttagctttgccaggaaatcctgaggctccagggaacatgggtttatttgatcaacagttggctcttcagtgggttcaaaaaaatatagcagcctttggtggaaatcctaaaagtgtaactctctttggagaaagtgcaggagcagcttcagttagcctgcatttgctttctcctggaagccattcattgttcaccagagccattctgcaaagtggttccgckaatgctccttgggcggtaacatctctttatgaagctaggaacagaacgttgaacttagctaaattgactggttgctctagagagaatgagactgaaataatcaagtgtcttagaaataaagatccccaagaaattcttctgaatgaagcatttgttgtcccctatgggactcctttgtcagtaaactttggtccgaccgtggatggtgattttctcactgacatgccagacatattacttgaacttggacaatttaaaaaaacccagattttggtgggtgttaataaagatgaagggacagcttttttagtctatggtgctcctggcttcagcaaagataacaatagtatcataactagaaaagaatttcaggaaggtttaaaaatattttttccaggagtgagtgagtttggaaaggaatccatcctttttcattacacagactgggtagatgatcagagacctgaaaactaccgtgaggccttgggtgatgttgttggggattataatttcatatgccctgccttggagttcaccaagaagttctcagaatggggaaataatgcctttttctactattttgaacaccgatcctccaaacttccgtggccagaatggatgggagtgatgcatggcaatgaaattgaatttgtctttggtttacctctggaaagaagagataattacacaaaagccgaggaaattttgagtagatccatagtgaaacggtgggcaaattttgcaaaatatgggaatccaaatgagactcagaacaatagcacaagctggcctgtcttcaaaagcactgaacaaaaatatctaaccttgaatacagagtcaacaagaataatgacgaaactacgtgctcaacaatgtcgattctggacatcattttttccaaaagtcttggaaatgacaggaaatattgatgaagcagaatgggagtggaaagcaggattccatcgctggaacaattacatgatggactggaaaaatcaatttaacgattacactagcaagaaagaaagttgtgtgggtctc

SEQ ID NO: 164 - protein, 574 aa, Artificial Sequence
  synthetic butyrylcholinesterase variant
  VARIANT 227: Xaa = Ala
EDDIIIATKNGKVRGMNLTVFGGTVTAFLGIPYAQPPLGRLRFKKPQSLTKWSDIWNATKYANSCCQNIDQSFPGFHGSEMWNPNTDLSEDCLYLNVWIPAPKPKNATVLIWIYGGGFQTGTSSLHVYDGKFLARVERVIVVSMNYRVGALGFLALPGNPEAPGNMGLFDQQLALQWVQKNIAAFGGNPKSVTLFGESAGAASVSLHLLSPGSHSLFTRAILQSGSXNAPWAVTSLYEARNRTLNLAKLTGCSRENETEIIKCLRNKDPQEILLNEAFVVPYGTPLSVNFGPTVDGDFLTDMPDILLELGQFKKTQILVGVNKDEGTAFLVYGAPGFSKDNNSIITRKEFQEGLKIFFPGVSEFGKESILFHYTDWVDDQRPENYREALGDVVGDYNFICPALEFTKKFSEWGNNAFFYYFEHRSSKLPWPEWMGVMHGNEIEFVFGLPLERRDNYTKAEEILSRSIVKRWANFAKYGNPNETQNNSTSWPVFKSTEQKYLTLNTESTRIMTKLRAQQCRFWTSFFPKVLEMTGNIDEAEWEWKAGFHRWNNYMMDWKNQFNDYTSKKESCVGL

SEQ ID NO: 165 - DNA, 1722 bp, Artificial Sequence
  CDS (1)...(1722): synthetic butyrylcholinesterase variant
gaagatgacatcataattgcaacaaagaatggaaaagtcagagggatgaacttgacagtttttggtggcacggtaacagcctttcttggaattccctatgcacagccacctcttggtagacttcgattcaaaaagccacagtctctgaccaagtggtctgatatttggaatgccacaaaatatgcaaattcttgctgtcagaacatagatcaaagttttccaggcttccatggatcagagatgtggaacccaaacactgacctcagtgaagactgtttatatctaaatgtatggattccagcacctaaaccaaaaaatgccactgtattgatatggatttatggtggtggttttcaaactggaacatcatctttacatgtttatgatggcaagtttctggctcgggttgaaagagttattgtagtgtcaatgaactatagggtgggtgccctaggattcttagctttgccaggaaatcctgaggctccagggaacatgggtttatttgatcaacagttggctcttcagtgggttcaaaaaaatatagcagcctttggtggaaatcctaaaagtgtaactctctttggagaaagtgcaggagcagcttcagttagcctgcatttgctttctcctggaagccattcattgttcaccagagccattctgcaaagtggttccgckaatgctccttgggcggtaacatctctttatgaagctaggaacagaacgttgaacttagctaaattgactggttgctctagagagaatgagactgaaataatcaagtgtcttagaaataaagatccccaagaaattcttctgaatgaagcatttgttgtcccctatgggactcctttgtcagtaaactttggtccgaccgtggatggtgattttctcactgacatgccagacatattacttgaacttggacaatttaaaaaaacccagattttggtgggtgttaataaagatgaagggacagcttttttagtctatggtgctcctggcttcagcaaagataacaatagtatcataactagaaaagaatttcaggaaggtttaaaaatattttttccaggagtgagtgagtttggaaaggaatccatcctttttcattacacagactgggtagatgatcagagacctgaaaactaccgtgaggccttgggtgatgttgttggggattataatttcatatgccctgccttggagttcaccaagaagttctcagaatggggaaataatgcctttttctactattttgaacaccgatcctccaaacttccgtggccagaatggatgggagtgatgcatggccaggaaattgaatttgtctttggtttacctctggaaagaagagataattacacaaaagccgaggaaattttgagtagatccatagtgaaacggtgggcaaattttgcaaaatatgggaatccaaatgagactcagaacaatagcacaagctggcctgtcttcaaaagcactgaacaaaaatatctaaccttgaatacagagtcaacaagaataatgacgaaactacgtgctcaacaatgtcgattctggacatcattttttccaaaagtcttggaaatgacaggaaatattgatgaagcagaatgggagtggaaagcaggattccatcgctggaacaattacatgatggactggaaaaatcaatttaacgattacactagcaagaaagaaagttgtgtgggtctc

SEQ ID NO: 166 - protein, 574 aa, Artificial Sequence
  synthetic butyrylcholinesterase variant
  VARIANT 227: Xaa = Ala
EDDIIIATKNGKVRGMNLTVFGGTVTAFLGIPYAQPPLGRLRFKKPQSLTKWSDIWNATKYANSCCQNIDQSFPGFHGSEMWNPNTDLSEDCLYLNVWIPAPKPKNATVLIWIYGGGFQTGTSSLHVYDGKFLARVERVIVVSMNYRVGALGFLALPGNPEAPGNMGLFDQQLALQWVQKNIAAFGGNPKSVTLFGESAGAASVSLHLLSPGSHSLFTRAILQSGSXNAPWAVTSLYEARNRTLNLAKLTGCSRENETEIIKCLRNKDPQEILLNEAFVVPYGTPLSVNFGPTVDGDFLTDMPDILLELGQFKKTQILVGVNKDEGTAFLVYGAPGFSKDNNSIITRKEFQEGLKIFFPGVSEFGKESILFHYTDWVDDQRPENYREALGDVVGDYNFICPALEFTKKFSEWGNNAFFYYFEHRSSKLPWPEWMGVMHGQEIEFVFGLPLERRDNYTKAEEILSRSIVKRWANFAKYGNPNETQNNSTSWPVFKSTEQKYLTLNTESTRIMTKLRAQQCRFWTSFFPKVLEMTGNIDEAEWEWKAGFHRWNNYMMDWKNQFNDYTSKKESCVGL

SEQ ID NO: 167 - DNA, 1722 bp, Artificial Sequence
  CDS (1)...(1722): synthetic butyrylcholinesterase variant
gaagatgacatcataattgcaacaaagaatggaaaagtcagagggatgaacttgacagtttttggtggcacggtaacagcctttcttggaattccctatgcacagccacctcttggtagacttcgattcaaaaagccacagtctctgaccaagtggtctgatatttggaatgccacaaaatatgcaaattcttgctgtcagaacatagatcaaagttttccaggcttccatggatcagagatgtggaacccaaacactgacctcagtgaagactgtttatatctaaatgtatggattccagcacctaaaccaaaaaatgccactgtattgatatggatttatggtggtggttttcaaactggaacatcatctttacatgtttatgatggcaagtttctggctcgggttgaaagagttattgtagtgtcaatgaactatagggtgggtgccctaggattcttagctttgccaggaaatcctgaggctccagggaacatgggtttatttgatcaacagttggctcttcagtgggttcaaaaaaatatagcagcctttggtggaaatcctaaaagtgtaactctctttggagaaagtgcaggagcagcttcagttagcctgcatttgctttctcctggaagccattcattgttcaccagagccattctgcaaagtggttccgckaatgctccttgggcggtaacatctctttatgaagctaggaacagaacgttgaacttagctaaattgactggttgctctagagagaatgagactgaaataatcaagtgtcttagaaataaagatccccaagaaattcttctgaatgaagcatttgttgtcccctatgggactcctttgtcagtaaactttggtccgaccgtggatggtgattttctcactgacatgccagacatattacttgaacttggacaatttaaaaaaacccagattttggtgggtgttaataaagatgaagggacagcttttttagtctatggtgctcctggcttcagcaaagataacaatagtatcataactagaaaagaatttcaggaaggtttaaaaatattttttccaggagtgagtgagtttggaaaggaatccatcctttttcattacacagactgggtagatgatcagagacctgaaaactaccgtgaggccttgggtgatgttgttggggattataatttcatatgccctgccttggagttcaccaagaagttctcagaatggggaaataatgcctttttctactattttgaacaccgatcctccaaacttccgtggccagaatggatgggagtgatgcatggcagggaaattgaatttgtctttggtttacctctggaaagaagagataattacacaaaagccgaggaaattttgagtagatccatagtgaaacggtgggcaaattttgcaaaatatgggaatccaaatgagactcagaacaatagcacaagctggcctgtcttcaaaagcactgaacaaaaatatctaaccttgaatacagagtcaacaagaataatgacgaaactacgtgctcaacaatgtcgattctggacatcattttttccaaaagtcttggaaatgacaggaaatattgatgaagcagaatgggagtggaaagcaggattccatcgctggaacaattacatgatggactggaaaaatcaatttaacgattacactagcaagaaagaaagttgtgtgggtctc

SEQ ID NO: 168 - protein, 574 aa, Artificial Sequence
  synthetic butyrylcholinesterase variant
  VARIANT 227: Xaa = Ala
EDDIIIATKNGKVRGMNLTVFGGTVTAFLGIPYAQPPLGRLRFKKPQSLTKWSDIWNATKYANSCCQNIDQSFPGFHGSEMWNPNTDLSEDCLYLNVWIPAPKPKNATVLIWIYGGGFQTGTSSLHVYDGKFLARVERVIVVSMNYRVGALGFLALPGNPEAPGNMGLFDQQLALQWVQKNIAAFGGNPKSVTLFGESAGAASVSLHLLSPGSHSLFTRAILQSGSXNAPWAVTSLYEARNRTLNLAKLTGCSRENETEIIKCLRNKDPQEILLNEAFVVPYGTPLSVNFGPTVDGDFLTDMPDILLELGQFKKTQILVGVNKDEGTAFLVYGAPGFSKDNNSIITRKEFQEGLKIFFPGVSEFGKESILFHYTDWVDDQRPENYREALGDVVGDYNFICPALEFTKKFSEWGNNAFFYYFEHRSSKLPWPEWMGVMHGREIEFVFGLPLERRDNYTKAEEILSRSIVKRWANFAKYGNPNETQNNSTSWPVFKSTEQKYLTLNTESTRIMTKLRAQQCRFWTSFFPKVLEMTGNIDEAEWEWKAGFHRWNNYMMDWKNQFNDYTSKKESCVGL

SEQ ID NO: 169 - DNA, 1722 bp, Artificial Sequence
  CDS (1)...(1722): synthetic butyrylcholinesterase variant
gaagatgacatcataattgcaacaaagaatggaaaagtcagagggatgaacttgacagtttttggtggcacggtaacagcctttcttggaattccctatgcacagccacctcttggtagacttcgattcaaaaagccacagtctctgaccaagtggtctgatatttggaatgccacaaaatatgcaaattcttgctgtcagaacatagatcaaagttttccaggcttccatggatcagagatgtggaacccaaacactgacctcagtgaagactgtttatatctaaatgtatggattccagcacctaaaccaaaaaatgccactgtattgatatggatttatggtggtggttttcaaactggaacatcatctttacatgtttatgatggcaagtttctggctcgggttgaaagagttattgtagtgtcaatgaactatagggtgggtgccctaggattcttagctttgccaggaaatcctgaggctccagggaacatgggtttatttgatcaacagttggctcttcagtgggttcaaaaaaatatagcagcctttggtggaaatcctaaaagtgtaactctctttggagaaagtgcaggagcagcttcagttagcctgcatttgctttctcctggaagccattcattgttcaccagagccattctgcaaagtggttccgckaatgctccttgggcggtaacatctctttatgaagctaggaacagaacgttgaacttagctaaattgactggttgctctagagagaatgagactgaaataatcaagtgtcttagaaataaagatccccaagaaattcttctgaatgaagcatttgttgtcccctatgggactcctttgtcagtaaactttggtccgaccgtggatggtgattttctcactgacatgccagacatattacttgaacttggacaatttaaaaaaacccagattttggtgggtgttaataaagatgaagggacagcttttttagtctatggtgctcctggcttcagcaaagataacaatagtatcataactagaaaagaatttcaggaaggtttaaaaatattttttccaggagtgagtgagtttggaaaggaatccatcctttttcattacacagactgggtagatgatcagagacctgaaaactaccgtgaggccttgggtgatgttgttggggattataatttcatatgccctgccttggagttcaccaagaagttctcagaatggggaaataatgcctttttctactattttgaacaccgatcctccaaacttccgtggccagaatggatgggagtgatgcatggctctgaaattgaatttgtctttggtttacctctggaaagaagagataattacacaaaagccgaggaaattttgagtagatccatagtgaaacggtgggcaaattttgcaaaatatgggaatccaaatgagactcagaacaatagcacaagctggcctgtcttcaaaagcactgaacaaaaatatctaaccttgaatacagagtcaacaagaataatgacgaaactacgtgctcaacaatgtcgattctggacatcattttttccaaaagtcttggaaatgacaggaaatattgatgaagcagaatgggagtggaaagcaggattccatcgctggaacaattacatgatggactggaaaaatcaatttaacgattacactagcaagaaagaaagttgtgtgggtctc

SEQ ID NO: 170 - protein, 574 aa, Artificial Sequence
  synthetic butyrylcholinesterase variant
  VARIANT 227: Xaa = Ala
EDDIIIATKNGKVRGMNLTVFGGTVTAFLGIPYAQPPLGRLRFKKPQSLTKWSDIWNATKYANSCCQNIDQSFPGFHGSEMWNPNTDLSEDCLYLNVWIPAPKPKNATVLIWIYGGGFQTGTSSLHVYDGKFLARVERVIVVSMNYRVGALGFLALPGNPEAPGNMGLFDQQLALQWVQKNIAAFGGNPKSVTLFGESAGAASVSLHLLSPGSHSLFTRAILQSGSXNAPWAVTSLYEARNRTLNLAKLTGCSRENETEIIKCLRNKDPQEILLNEAFVVPYGTPLSVNFGPTVDGDFLTDMPDILLELGQFKKTQILVGVNKDEGTAFLVYGAPGFSKDNNSIITRKEFQEGLKIFFPGVSEFGKESILFHYTDWVDDQRPENYREALGDVVGDYNFICPALEFTKKFSEWGNNAFFYYFEHRSSKLPWPEWMGVMHGSEIEFVFGLPLERRDNYTKAEEILSRSIVKRWANFAKYGNPNETQNNSTSWPVFKSTEQKYLTLNTESTRIMTKLRAQQCRFWTSFFPKVLEMTGNIDEAEWEWKAGFHRWNNYMMDWKNQFNDYTSKKESCVGL

SEQ ID NO: 171 - DNA, 1722 bp, Artificial Sequence
  CDS (1)...(1722): synthetic butyrylcholinesterase variant
gaagatgacatcataattgcaacaaagaatggaaaagtcagagggatgaacttgacagtttttggtggcacggtaacagcctttcttggaattccctatgcacagccacctcttggtagacttcgattcaaaaagccacagtctctgaccaagtggtctgatatttggaatgccacaaaatatgcaaattcttgctgtcagaacatagatcaaagttttccaggcttccatggatcagagatgtggaacccaaacactgacctcagtgaagactgtttatatctaaatgtatggattccagcacctaaaccaaaaaatgccactgtattgatatggatttatggtggtggttttcaaactggaacatcatctttacatgtttatgatggcaagtttctggctcgggttgaaagagttattgtagtgtcaatgaactatagggtgggtgccctaggattcttagctttgccaggaaatcctgaggctccagggaacatgggtttatttgatcaacagttggctcttcagtgggttcaaaaaaatatagcagcctttggtggaaatcctaaaagtgtaactctctttggagaaagtgcaggagcagcttcagttagcctgcatttgctttctcctggaagccattcattgttcaccagagccattctgcaaagtggttccgckaatgctccttgggcggtaacatctctttatgaagctaggaacagaacgttgaacttagctaaattgactggttgctctagagagaatgagactgaaataatcaagtgtcttagaaataaagatccccaagaaattcttctgaatgaagcatttgttgtcccctatgggactcctttgtcagtaaactttggtccgaccgtggatggtgattttctcactgacatgccagacatattacttgaacttggacaatttaaaaaaacccagattttggtgggtgttaataaagatgaagggacagcttttttagtctatggtgctcctggcttcagcaaagataacaatagtatcataactagaaaagaatttcaggaaggtttaaaaatattttttccaggagtgagtgagtttggaaaggaatccatcctttttcattacacagactgggtagatgatcagagacctgaaaactaccgtgaggccttgggtgatgttgttggggattataatttcatatgccctgccttggagttcaccaagaagttctcagaatggggaaataatgcctttttctactattttgaacaccgatcctccaaacttccgtggccagaatggatgggagtgatgcatggcactgaaattgaatttgtctttggtttacctctggaaagaagagataattacacaaaagccgaggaaattttgagtagatccatagtgaaacggtgggcaaattttgcaaaatatgggaatccaaatgagactcagaacaatagcacaagctggcctgtcttcaaaagcactgaacaaaaatatctaaccttgaatacagagtcaacaagaataatgacgaaactacgtgctcaacaatgtcgattctggacatcattttttccaaaagtcttggaaatgacaggaaatattgatgaagcagaatgggagtggaaagcaggattccatcgctggaacaattacatgatggactggaaaaatcaatttaacgattacactagcaagaaagaaagttgtgtgggtctc

SEQ ID NO: 172 - protein, 574 aa, Artificial Sequence
  synthetic butyrylcholinesterase variant
  VARIANT 227: Xaa = Ala
EDDIIIATKNGKVRGMNLTVFGGTVTAFLGIPYAQPPLGRLRFKKPQSLTKWSDIWNATKYANSCCQNIDQSFPGFHGSEMWNPNTDLSEDCLYLNVWIPAPKPKNATVLIWIYGGGFQTGTSSLHVYDGKFLARVERVIVVSMNYRVGALGFLALPGNPEAPGNMGLFDQQLALQWVQKNIAAFGGNPKSVTLFGESAGAASVSLHLLSPGSHSLFTRAILQSGSXNAPWAVTSLYEARNRTLNLAKLTGCSRENETEIIKCLRNKDPQEILLNEAFVVPYGTPLSVNFGPTVDGDFLTDMPDILLELGQFKKTQILVGVNKDEGTAFLVYGAPGFSKDNNSIITRKEFQEGLKIFFPGVSEFGKESILFHYTDWVDDQRPENYREALGDVVGDYNFICPALEFTKKFSEWGNNAFFYYFEHRSSKLPWPEWMGVMHGTEIEFVFGLPLERRDNYTKAEEILSRSIVKRWANFAKYGNPNETQNNSTSWPVFKSTEQKYLTLNTESTRIMTKLRAQQCRFWTSFFPKVLEMTGNIDEAEWEWKAGFHRWNNYMMDWKNQFNDYTSKKESCVGL

SEQ ID NO: 173 - DNA, 1722 bp, Artificial Sequence
  CDS (1)...(1722): synthetic butyrylcholinesterase variant
gaagatgacatcataattgcaacaaagaatggaaaagtcagagggatgaacttgacagtttttggtggcacggtaacagcctttcttggaattccctatgcacagccacctcttggtagacttcgattcaaaaagccacagtctctgaccaagtggtctgatatttggaatgccacaaaatatgcaaattcttgctgtcagaacatagatcaaagttttccaggcttccatggatcagagatgtggaacccaaacactgacctcagtgaagactgtttatatctaaatgtatggattccagcacctaaaccaaaaaatgccactgtattgatatggatttatggtggtggttttcaaactggaacatcatctttacatgtttatgatggcaagtttctggctcgggttgaaagagttattgtagtgtcaatgaactatagggtgggtgccctaggattcttagctttgccaggaaatcctgaggctccagggaacatgggtttatttgatcaacagttggctcttcagtgggttcaaaaaaatatagcagcctttggtggaaatcctaaaagtgtaactctctttggagaaagtgcaggagcagcttcagttagcctgcatttgctttctcctggaagccattcattgttcaccagagccattctgcaaagtggttccgckaatgctccttgggcggtaacatctctttatgaagctaggaacagaacgttgaacttagctaaattgactggttgctctagagagaatgagactgaaataatcaagtgtcttagaaataaagatccccaagaaattcttctgaatgaagcatttgttgtcccctatgggactcctttgtcagtaaactttggtccgaccgtggatggtgattttctcactgacatgccagacatattacttgaacttggacaatttaaaaaaacccagattttggtgggtgttaataaagatgaagggacagcttttttagtctatggtgctcctggcttcagcaaagataacaatagtatcataactagaaaagaatttcaggaaggtttaaaaatattttttccaggagtgagtgagtttggaaaggaatccatcctttttcattacacagactgggtagatgatcagagacctgaaaactaccgtgaggccttgggtgatgttgttggggattataatttcatatgccctgccttggagttcaccaagaagttctcagaatggggaaataatgcctttttctactattttgaacaccgatcctccaaacttccgtggccagaatggatgggagtgatgcatggctatactattgaatttgtctttggtttacctctggaaagaagagataattacacaaaagccgaggaaattttgagtagatccatagtgaaacggtgggcaaattttgcaaaatatgggaatccaaatgagactcagaacaatagcacaagctggcctgtcttcaaaagcactgaacaaaaatatctaaccttgaatacagagtcaacaagaataatgacgaaactacgtgctcaacaatgtcgattctggacatcattttttccaaaagtcttggaaatgacaggaaatattgatgaagcagaatgggagtggaaagcaggattccatcgctggaacaattacatgatggactggaaaaatcaatttaacgattacactagcaagaaagaaagttgtgtgggtctc

SEQ ID NO: 174 - protein, 574 aa, Artificial Sequence
  synthetic butyrylcholinesterase variant
  VARIANT 227: Xaa = Ala
EDDIIIATKNGKVRGMNLTVFGGTVTAFLGIPYAQPPLGRLRFKKPQSLTKWSDIWNATKYANSCCQNIDQSFPGFHGSEMWNPNTDLSEDCLYLNVWIPAPKPKNATVLIWIYGGGFQTGTSSLHVYDGKFLARVERVIVVSMNYRVGALGFLALPGNPEAPGNMGLFDQQLALQWVQKNIAAFGGNPKSVTLFGESAGAASVSLHLLSPGSHSLFTRAILQSGSXNAPWAVTSLYEARNRTLNLAKLTGCSRENETEIIKCLRNKDPQEILLNEAFVVPYGTPLSVNFGPTVDGDFLTDMPDILLELGQFKKTQILVGVNKDEGTAFLVYGAPGFSKDNNSIITRKEFQEGLKIFFPGVSEFGKESILFHYTDWVDDQRPENYREALGDVVGDYNFICPALEFTKKFSEWGNNAFFYYFEHRSSKLPWPEWMGVMHGYTIEFVFGLPLERRDNYTKAEEILSRSIVKRWANFAKYGNPNETQNNSTSWPVFKSTEQKYLTLNTESTRIMTKLRAQQCRFWTSFFPKVLEMTGNIDEAEWEWKAGFHRWNNYMMDWKNQFNDYTSKKESCVGL

SEQ ID NO: 175 - DNA, 1722 bp, Artificial Sequence
  CDS (1)...(1722): synthetic butyrylcholinesterase variant
gaagatgacatcataattgcaacaaagaatggaaaagtcagagggatgaacttgacagtttttggtggcacggtaacagcctttcttggaattccctatgcacagccacctcttggtagacttcgattcaaaaagccacagtctctgaccaagtggtctgatatttggaatgccacaaaatatgcaaattcttgctgtcagaacatagatcaaagttttccaggcttccatggatcagagatgtggaacccaaacactgacctcagtgaagactgtttatatctaaatgtatggattccagcacctaaaccaaaaaatgccactgtattgatatggatttatggtggtggttttcaaactggaacatcatctttacatgtttatgatggcaagtttctggctcgggttgaaagagttattgtagtgtcaatgaactatagggtgggtgccctaggattcttagctttgccaggaaatcctgaggctccagggaacatgggtttatttgatcaacagttggctcttcagtgggttcaaaaaaatatagcagcctttggtggaaatcctaaaagtgtaactctctttggagaaagtgcaggagcagcttcagttagcctgcatttgctttctcctggaagccattcattgttcaccagagccattctgcaaagtggttccgckaatgctccttgggcggtaacatctctttatgaagctaggaacagaacgttgaacttagctaaattgactggttgctctagagagaatgagactgaaataatcaagtgtcttagaaataaagatccccaagaaattcttctgaatgaagcatttgttgtcccctatgggactcctttgtcagtaaactttggtccgaccgtggatggtgattttctcactgacatgccagacatattacttgaacttggacaatttaaaaaaacccagattttggtgggtgttaataaagatgaagggacagcttttttagtctatggtgctcctggcttcagcaaagataacaatagtatcataactagaaaagaatttcaggaaggtttaaaaatattttttccaggagtgagtgagtttggaaaggaatccatcctttttcattacacagactgggtagatgatcagagacctgaaaactaccgtgaggccttgggtgatgttgttggggattataatttcatatgccctgccttggagttcaccaagaagttctcagaatggggaaataatgcctttttctactattttgaacaccgatcctccaaacttccgtggccagaatggatgggagtgatgcatggctatgaactggaatttgtctttggtttacctctggaaagaagagataattacacaaaagccgaggaaattttgagtagatccatagtgaaacggtgggcaaattttgcaaaatatgggaatccaaatgagactcagaacaatagcacaagctggcctgtcttcaaaagcactgaacaaaaatatctaaccttgaatacagagtcaacaagaataatgacgaaactacgtgctcaacaatgtcgattctggacatcattttttccaaaagtcttggaaatgacaggaaatattgatgaagcagaatgggagtggaaagcaggattccatcgctggaacaattacatgatggactggaaaaatcaatttaacgattacactagcaagaaagaaagttgtgtgggtctc

SEQ ID NO: 176 - protein, 574 aa, Artificial Sequence
  synthetic butyrylcholinesterase variant
  VARIANT 227: Xaa = Ala
EDDIIIATKNGKVRGMNLTVFGGTVTAFLGIPYAQPPLGRLRFKKPQSLTKWSDIWNATKYANSCCQNIDQSFPGFHGSEMWNPNTDLSEDCLYLNVWIPAPKPKNATVLIWIYGGGFQTGTSSLHVYDGKFLARVERVIVVSMNYRVGALGFLALPGNPEAPGNMGLFDQQLALQWVQKNIAAFGGNPKSVTLFGESAGAASVSLHLLSPGSHSLFTRAILQSGSXNAPWAVTSLYEARNRTLNLAKLTGCSRENETEIIKCLRNKDPQEILLNEAFVVPYGTPLSVNFGPTVDGDFLTDMPDILLELGQFKKTQILVGVNKDEGTAFLVYGAPGFSKDNNSIITRKEFQEGLKIFFPGVSEFGKESILFHYTDWVDDQRPENYREALGDVVGDYNFICPALEFTKKFSEWGNNAFFYYFEHRSSKLPWPEWMGVMHGYELEFVFGLPLERRDNYTKAEEILSRSIVKRWANFAKYGNPNETQNNSTSWPVFKSTEQKYLTLNTESTRIMTKLRAQQCRFWTSFFPKVLEMTGNIDEAEWEWKAGFHRWNNYMMDWKNQFNDYTSKKESCVGL

SEQ ID NO: 177 - DNA, 1722 bp, Artificial Sequence
  CDS (1)...(1722): synthetic butyrylcholinesterase variant
gaagatgacatcataattgcaacaaagaatggaaaagtcagagggatgaacttgacagtttttggtggcacggtaacagcctttcttggaattccctatgcacagccacctcttggtagacttcgattcaaaaagccacagtctctgaccaagtggtctgatatttggaatgccacaaaatatgcaaattcttgctgtcagaagatagatcaaagttttccaggcttctttggatcagagatgtggaacccaaacactgacctcagtgaagactgtttatatctaaatgtatggattccagcacctaaaccaaaaaatgccactgtattgatatggatttatggtggtggttttcaaactggaacatcatctttacatgtttatgatggcaagtttctggctcgggttgaaagagttattgtagtgtcaatgaactatagggtgggtgccctaggattcttagctttgccaggaaatcctgaggctccagggaacatgggtttatttgatcaacagttggctcttcagtgggttcaaaaaaatatagcagcctttggtggaaatcctaaaagtgtaactctctttggagaaagtgcaggagcagcttcagttagcctgcatttgctttctcctggaagccattcattgttcaccagagccattctgcaaagtggttccgckaatgctccttgggcggtaacatctctttatgaagctaggaacagaacgttgaacttagctaaattgactggttgctctagagagaatgagactgaaataatcaagtgtcttagaaataaagatccccaagaaattcttctgaatgaagcatttgttgtcccctatgggactaatttgtcagtaaactttggtccgaccgtggatggtgattttctcactgacatgccagacatattacttgaacttggacaatttaaaaaaacccagattttggtgggtgttaataaagatgaagggacagcttttttagcgtatggtgctcctggcttcagcaaagataacaatagtatcataactagaaaagaatttcaggaaggtttaaaaatattttttccaggagtgagtgagtttggaaaggaatccatcctttttcattacacagactgggtagatgatcagagacctgaaaactaccgtgaggccttgggtgatgttgttggggattataatttcatatgccctgccttggagttcaccaagaagttctcagaatggggaaataatgcctttttctactattttgaacaccgatcctccaaacttccgtggccagaatggatgggagtgatgcatggctatgaaattgaatttgtctttggtttacctctggaaagaagagataattacacaaaagccgaggaaattttgagtagatccatagtgaaacggtgggcaaattttgcaaaatatgggaatccaaatgagactcagaacaatagcacaagctggcctgtcttcaaaagcactgaacaaaaatatctaaccttgaatacagagtcaacaagaataatgacgaaactacgtgctcaacaatgtcgattctggacatcattttttccaaaagtcttggaaatgacaggaaatattgatgaagcagaatgggagtggaaagcaggattccatcgctggaacaattacatgatggactggaaaaatcaatttaacgattacactagcaagaaagaaagttgtgtgggtctc

SEQ ID NO: 178 - protein, 574 aa, Artificial Sequence
  synthetic butyrylcholinesterase variant
  VARIANT 227: Xaa = Ala
EDDIIIATKNGKVRGMNLTVFGGTVTAFLGIPYAQPPLGRLRFKKPQSLTKWSDIWNATKYANSCCQKIDQSFPGFFGSEMWNPNTDLSEDCLYLNVWIPAPKPKNATVLIWIYGGGFQTGTSSLHVYDGKFLARVERVIVVSMNYRVGALGFLALPGNPEAPGNMGLFDQQLALQWVQKNIAAFGGNPKSVTLFGESAGAASVSLHLLSPGSHSLFTRAILQSGSXNAPWAVTSLYEARNRTLNLAKLTGCSRENETEIIKCLRNKDPQEILLNEAFVVPYGTNLSVNFGPTVDGDFLTDMPDILLELGQFKKTQILVGVNKDEGTAFLAYGAPGFSKDNNSIITRKEFQEGLKIFFPGVSEFGKESILFHYTDWVDDQRPENYREALGDVVGDYNFICPALEFTKKFSEWGNNAFFYYFEHRSSKLPWPEWMGVMHGYEIEFVFGLPLERRDNYTKAEEILSRSIVKRWANFAKYGNPNETQNNSTSWPVFKSTEQKYLTLNTESTRIMTKLRAQQCRFWTSFFPKVLEMTGNIDEAEWEWKAGFHRWNNYMMDWKNQFNDYTSKKESCVGL

SEQ ID NO: 179 - DNA, 1722 bp, Artificial Sequence
  CDS (1)...(1722): synthetic butyrylcholinesterase variant
gaagatgacatcataattgcaacaaagaatggaaaagtcagagggatgaacttgacagtttttggtggcacggtaacagcctttcttggaattccctatgcacagccacctcttggtagacttcgattcaaaaagccacagtctctgaccaagtggtctgatatttggaatgccacaaaatatgcaaattcttgctgtcagaacatagatcaaagttttccaggcttctttggatcagagatgtggaacccaaacactgacctcagtgaagactgtttatatctaaatgtatggattccagcacctaaaccaaaaaatgccactgtattgatatggatttatggtggtggttttcaaactggaacatcatctttacatgtttatgatggcaagtttctggctcgggttgaaagagttattgtagtgtcaatgaactatagggtgggtgccctaggattcttagctttgccaggaaatcctgaggctccagggaacatgggtttatttgatcaacagttggctcttcagtgggttcaaaaaaatatagcagcctttggtggaaatcctaaaagtgtaactctctttggagaaagtgcaggagcagcttcagttagcctgcatttgctttctcctggaagccattcattgttcaccagagccattctgcaaagtggttccgckaatgctccttgggcggtaacatctctttatgaagctaggaacagaacgttgaacttagctaaattgactggttgctctagagagaatgagactgaaataatcaagtgtcttagaaataaagatccccaagaaattcttctgaatgaagcatttgttgtcccctatgggactaatttgtcagtaaactttggtccgaccgtggatggtgattttctcactgacatgccagacatattacttgaacttggacaatttaaaaaaacccagattttggtgggtgttaataaagatgaagggacagcttttttagcgtatggtgctcctggcttcagcaaagataacaatagtatcataactagaaaagaatttcaggaaggtttaaaaatattttttccaggagtgagtgagtttggaaaggaatccatcctttttcattacacagactgggtagatgatcagagacctgaaaactaccgtgaggccttgggtgatgttgttggggattataatttcatatgccctgccttggagttcaccaagaagttctcagaatggggaaataatgcctttttctactattttgaacaccgatcctccaaacttccgtggccagaatggatgggagtgatgcatggctatgaaattgaatttgtctttggtttacctctggaaagaagagataattacacaaaagccgaggaaattttgagtagatccatagtgaaacggtgggcaaattttgcaaaatatgggaatccaaatgagactcagaacaatagcacaagctggcctgtcttcaaaagcactgaacaaaaatatctaaccttgaatacagagtcaacaagaataatgacgaaactacgtgctcaacaatgtcgattctggacatcattttttccaaaagtcttggaaatgacaggaaatattgatgaagcagaatgggagtggaaagcaggattccatcgctggaacaattacatgatggactggaaaaatcaatttaacgattacactagcaagaaagaaagttgtgtgggtctc

SEQ ID NO: 180 - protein, 574 aa, Artificial Sequence
  synthetic butyrylcholinesterase variant
  VARIANT 227: Xaa = Ala
EDDIIIATKNGKVRGMNLTVFGGTVTAFLGIPYAQPPLGRLRFKKPQSLTKWSDIWNATKYANSCCQNIDQSFPGFFGSEMWNPNTDLSEDCLYLNVWIPAPKPKNATVLIWIYGGGFQTGTSSLHVYDGKFLARVERVIVVSMNYRVGALGFLALPGNPEAPGNMGLFDQQLALQWVQKNIAAFGGNPKSVTLFGESAGAASVSLHLLSPGSHSLFTRAILQSGSXNAPWAVTSLYEARNRTLNLAKLTGCSRENETEIIKCLRNKDPQEILLNEAFVVPYGTNLSVNFGPTVDGDFLTDMPDILLELGQFKKTQILVGVNKDEGTAFLAYGAPGFSKDNNSIITRKEFQEGLKIFFPGVSEFGKESILFHYTDWVDDQRPENYREALGDVVGDYNFICPALEFTKKFSEWGNNAFFYYFEHRSSKLPWPEWMGVMHGYEIEFVFGLPLERRDNYTKAEEILSRSIVKRWANFAKYGNPNETQNNSTSWPVFKSTEQKYLTLNTESTRIMTKLRAQQCRFWTSFFPKVLEMTGNIDEAEWEWKAGFHRWNNYMMDWKNQFNDYTSKKESCVGL

SEQ ID NO: 181 - DNA, 1722 bp, Artificial Sequence
  CDS (1)...(1722): synthetic butyrylcholinesterase variant
gaagatgacatcataattgcaacaaagaatggaaaagtcagagggatgaacttgacagtttttggtggcacggtaacagcctttcttggaattccctatgcacagccacctcttggtagacttcgattcaaaaagccacagtctctgaccaagtggtctgatatttggaatgccacaaaatatgcaaattcttgctgtcagaacatagatcaaagttttccaggcttctttggatcagagatgtggaacccaaacactgacctcagtgaagactgtttatatctaaatgtatggattccagcacctaaaccaaaaaatgccactgtattgatatggatttatggtggtggttttcaaactggaacatcatctttacatgtttatgatggcaagtttctggctcgggttgaaagagttattgtagtgtcaatgaactatagggtgggtgccctaggattcttagctttgccaggaaatcctgaggctccagggaacatgggtttatttgatcaacagttggctcttcagtgggttcaaaaaaatatagcagcctttggtggaaatcctaaaagtgtaactctctttggagaaagtgcaggagcagcttcagttagcctgcatttgctttctcctggaagccattcattgttcaccagagccattctgcaaagtggttccgckaatgctccttgggcggtaacatctctttatgaagctaggaacagaacgttgaacttagctaaattgactggttgctctagagagaatgagactgaaataatcaagtgtcttagaaataaagatccccaagaaattcttctgaatgaagcatttgttgtcccctatgggactaatttgtcagtaaactttggtccgaccgtggatggtgattttctcactgacatgccagacatattacttgaacttggacaatttaaaaaaacccagattttggtgggtgttaataaagatgaagggacagcttttttagcgtatggtgctcctggcttcagcaaagataacaatagtatcataactagaaaagaatttcaggaaggtttaaaaatattttttccaggagtgagtgagtttggaaaggaatccatcctttttcattacacagactgggtagatgatcagagacctgaaaactaccgtgaggccttgggtgatgttgttggggattataatttcatatgccctgccttggagttcaccaagaagttctcagaatggggaaataatgcctttttctactattttgaacaccgatcctccaaacttccgtggccagaatggctgggagtgatgcatggctatgaaattgaatttgtctttggtttacctctggaaagaagagataattacacaaaagccgaggaaattttgagtagatccatagtgaaacggtgggcaaattttgcaaaatatgggaatccaaatgagactcagaacaatagcacaagctggcctgtcttcaaaagcactgaacaaaaatatctaaccttgaatacagagtcaacaagaataatgacgaaactacgtgctcaacaatgtcgattctggacatcattttttccaaaagtcttggaaatgacaggaaatattgatgaagcagaatgggagtggaaagcaggattccatcgctggaacaattacatgatggactggaaaaatcaatttaacgattacactagcaagaaagaaagttgtgtgggtctc

SEQ ID NO: 182 - protein, 574 aa, Artificial Sequence
  synthetic butyrylcholinesterase variant
  VARIANT 227: Xaa = Ala
EDDIIIATKNGKVRGMNLTVFGGTVTAFLGIPYAQPPLGRLRFKKPQSLTKWSDIWNATKYANSCCQNIDQSFPGFFGSEMWNPNTDLSEDCLYLNVWIPAPKPKNATVLIWIYGGGFQTGTSSLHVYDGKFLARVERVIVVSMNYRVGALGFLALPGNPEAPGNMGLFDQQLALQWVQKNIAAFGGNPKSVTLFGESAGAASVSLHLLSPGSHSLFTRAILQSGSXNAPWAVTSLYEARNRTLNLAKLTGCSRENETEIIKCLRNKDPQEILLNEAFVVPYGTNLSVNFGPTVDGDFLTDMPDILLELGQFKKTQILVGVNKDEGTAFLAYGAPGFSKDNNSIITRKEFQEGLKIFFPGVSEFGKESILFHYTDWVDDQRPENYREALGDVVGDYNFICPALEFTKKFSEWGNNAFFYYFEHRSSKLPWPEWLGVMHGYEIEFVFGLPLERRDNYTKAEEILSRSIVKRWANFAKYGNPNETQNNSTSWPVFKSTEQKYLTLNTESTRIMTKLRAQQCRFWTSFFPKVLEMTGNIDEAEWEWKAGFHRWNNYMMDWKNQFNDYTSKKESCVGL

SEQ ID NO: 183 - DNA, 1722 bp, Artificial Sequence
  CDS (1)...(1722): synthetic butyrylcholinesterase variant
gaagatgacatcataattgcaacaaagaatggaaaagtcagagggatgaacttgacagtttttggtggcacggtaacagcctttcttggaattccctatgcacagccacctcttggtagacttcgattcaaaaagccacagtctctgaccaagtggtctgatatttggaatgccacaaaatatgcaaattcttgctgtcagaacatagatcaaagttttccaggcttctttggatcagagatgtggaacccaaacactgacctcagtgaagactgtttatatctaaatgtatggattccagcacctaaaccaaaaaatgccactgtattgatatggatttatggtggtggttttcaaactggaacatcatctttacatgtttatgatggcaagtttctggctcgggttgaaagagttattgtagtgtcaatgaactatagggtgggtgccctaggattcttagctttgccaggaaatcctgaggctccagggaacatgggtttatttgatcaacagttggctcttcagtgggttcaaaaaaatatagcagcctttggtggaaatcctaaaagtgtaactctctttggagaaagtgcaggagcagcttcagttagcctgcatttgctttctcctggaagccattcattgttcaccagagccattctgcaaagtggttccgckaatgctccttgggcggtaacatctctttatgaagctaggaacagaacgttgaacttagctaaattgactggttgctctagagagaatgagactgaaataatcaagtgtcttagaaataaagatccccaagaaattcttctgaatgaagcatttgttgtcccctatgggactaatttgtcagtaaactttggtccgaccgtggatggtgattttctcactgacatgccagacatattacttgaacttggacaatttaaaaaaacccagattttggtgggtgttaataaagatgaagggacagcttttttagcgtatggtgctcctggcttcagcaaagataacaatagtatcataactagaaaagaatttcaggaaggtttaaaaatattttttccaggagtgagtgagtttggaaaggaatccatcctttttcattacacagactgggtagatgatcagagacctgaaaactaccgtgaggccttgggtgatgttgttggggattataatttcatatgccctgccttggagttcaccaagaagttctcagaatggggaaataatgcctttttctactattttgaacaccgatcctccaaacttcggtggccagaatggatgggagtgatgcatggctatgaaattgaatttgtctttggtttacctctggaaagaagagataattacacaaaagccgaggaaattttgagtagatccatagtgaaacggtgggcaaattttgcaaaatatgggaatccaaatgagactcagaacaatagcacaagctggcctgtcttcaaaagcactgaacaaaaatatctaaccttgaatacagagtcaacaagaataatgacgaaactacgtgctcaacaatgtcgattctggacatcattttttccaaaagtcttggaaatgacaggaaatattgatgaagcagaatgggagtggaaagcaggattccatcgctggaacaattacatgatggactggaaaaatcaatttaacgattacactagcaagaaagaaagttgtgtgggtctc

SEQ ID NO: 184 - protein, 574 aa, Artificial Sequence
  synthetic butyrylcholinesterase variant
  VARIANT 227: Xaa = Ala
EDDIIIATKNGKVRGMNLTVFGGTVTAFLGIPYAQPPLGRLRFKKPQSLTKWSDIWNATKYANSCCQNIDQSFPGFFGSEMWNPNTDLSEDCLYLNVWIPAPKPKNATVLIWIYGGGFQTGTSSLHVYDGKFLARVERVIVVSMNYRVGALGFLALPGNPEAPGNMGLFDQQLALQWVQKNIAAFGGNPKSVTLFGESAGAASVSLHLLSPGSHSLFTRAILQSGSXNAPWAVTSLYEARNRTLNLAKLTGCSRENETEIIKCLRNKDPQEILLNEAFVVPYGTNLSVNFGPTVDGDFLTDMPDILLELGQFKKTQILVGVNKDEGTAFLAYGAPGFSKDNNSIITRKEFQEGLKIFFPGVSEFGKESILFHYTDWVDDQRPENYREALGDVVGDYNFICPALEFTKKFSEWGNNAFFYYFEHRSSKLRWPEWMGVMHGYEIEFVFGLPLERRDNYTKAEEILSRSIVKRWANFAKYGNPNETQNNSTSWPVFKSTEQKYLTLNTESTRIMTKLRAQQCRFWTSFFPKVLEMTGNIDEAEWEWKAGFHRWNNYMMDWKNQFNDYTSKKESCVGL

SEQ ID NO: 185 - DNA, 1722 bp, Artificial Sequence
  CDS (1)...(1722): synthetic butyrylcholinesterase variant
gaagatgacatcataattgcaacaaagaatggaaaagtcagagggatgaacttgacagtttttggtggcacggtaacagcctttcttggaattccctatgcacagccacctcttggtagacttcgattcaaaaagccacagtctctgaccaagtggtctgatatttggaatgccacaaaatatgcaaattcttgctgtcagaacatagatcaaagttttccaggcttctttggatcagagatgtggaacccaaacactgacctcagtgaagactgtttatatctaaatgtatggattccagcacctaaaccaaaaaatgccactgtattgatatggatttatggtggtggttttcaatggggaacatcatctttacatgtttatgatggcaagtttctggctcgggttgaaagagttattgtagtgtcaatgaactatagggtgggtgccctaggattcttagctttgccaggaaatcctgaggctccagggaacatgggtttatttgatcaacagttggctcttcagtgggttcaaaaaaatatagcagcctttggtggaaatcctaaaagtgtaactctctttggagaaagtgcaggagcagcttcagttagcctgcatttgctttctcctggaagccattcattgttcaccagagccattctgcaaagtggttccgckaatgctccttgggcggtaacatctctttatgaagctaggaacagaacgttgaacttagctaaattgactggttgctctagagagaatgagactgaaataatcaagtgtcttagaaataaagatccccaagaaattcttctgaatgaagcatttgttgtcccctatgggactaatttgtcagtaaactttggtccgaccgtggatggtgattttctcactgacatgccagacatattacttgaacttggacaatttaaaaaaacccagattttggtgggtgttaataaagatgaagggacagcttttttagcgtatggtgctcctggcttcagcaaagataacaatagtatcataactagaaaagaatttcaggaaggtttaaaaatattttttccaggagtgagtgagtttggaaaggaatccatcctttttcattacacagactgggtagatgatcagagacctgaaaactaccgtgaggccttgggtgatgttgttggggattataatttcatatgccctgccttggagttcaccaagaagttctcagaatggggaaataatgcctttttctactattttgaacaccgatcctccaaacttccgtggccagaatggatgggagtgatgcatggctatgaaattgaatttgtctttggtttacctctggaaagaagagataattacacaaaagccgaggaaattttgagtagatccatagtgaaacggtgggcaaattttgcaaaatatgggaatccaaatgagactcagaacaatagcacaagctggcctgtcttcaaaagcactgaacaaaaatatctaaccttgaatacagagtcaacaagaataatgacgaaactacgtgctcaacaatgtcgattctggacatcattttttccaaaagtcttggaaatgacaggaaatattgatgaagcagaatgggagtggaaagcaggattccatcgctggaacaattacatgatggactggaaaaatcaatttaacgattacactagcaagaaagaaagttgtgtgggtctc

SEQ ID NO: 186 - protein, 574 aa, Artificial Sequence
  synthetic butyrylcholinesterase variant
  VARIANT 227: Xaa = Ala
EDDIIIATKNGKVRGMNLTVFGGTVTAFLGIPYAQPPLGRLRFKKPQSLTKWSDIWNATKYANSCCQNIDQSFPGFFGSEMWNPNTDLSEDCLYLNVWIPAPKPKNATVLIWIYGGGFQWGTSSLHVYDGKFLARVERVIVVSMNYRVGALGFLALPGNPEAPGNMGLFDQQLALQWVQKNIAAFGGNPKSVTLFGESAGAASVSLHLLSPGSHSLFTRAILQSGSXNAPWAVTSLYEARNRTLNLAKLTGCSRENETEIIKCLRNKDPQEILLNEAFVVPYGTNLSVNFGPTVDGDFLTDMPDILLELGQFKKTQILVGVNKDEGTAFLAYGAPGFSKDNNSIITRKEFQEGLKIFFPGVSEFGKESILFHYTDWVDDQRPENYREALGDVVGDYNFICPALEFTKKFSEWGNNAFFYYFEHRSSKLPWPEWMGVMHGYEIEFVFGLPLERRDNYTKAEEILSRSIVKRWANFAKYGNPNETQNNSTSWPVFKSTEQKYLTLNTESTRIMTKLRAQQCRFWTSFFPKVLEMTGNIDEAEWEWKAGFHRWNNYMMDWKNQFNDYTSKKESCVGL

SEQ ID NO: 187 - DNA, 1722 bp, Artificial Sequence
  CDS (1)...(1722): synthetic butyrylcholinesterase variant
gaagatgacatcataattgcaacaaagaatggaaaagtcagagggatgaacttgacagtttttggtggcacggtaacagcctttcttggaattccctatgcacagccacctcttggtagacttcgattcaaaaagccacagtctctgaccaagtggtctgatatttggaatgccacaaaatatgcaaattcttgctgtcagaacatagatcaaagttttccaggcttctttggatcagagatgtggaacccaaacactgacctcagtgaagactgtttatatctaaatgtatggattccagcacctaaaccaaaaaatgccactgtattgatatggatttatggtggtggttttcaaactggaacatcatctttacatgtttatgatggcaagtttctggctcgggttgaaagagttattgtagtgtcaatgaactatagggtgggtgccctaggattcttagctttgccaggaaatcctgaggctccagggaacatgggtttatttgatcaacagttggctcttcagtgggttcaaaaaaatatagcagcctttggtggaaatcctaaaagtgtaactctctttggagaaagtgcaggagcagcttcagttagcctgcatttgctttctcctggaagccattcattgttcaccagagccattctgcaaagtggttccgckaatgctccttgggcggtaacatctctttatgaagctaggaacagaacgttgaacttagctaaattgactggttgctctagagagaatgagactgaaataatcaagtgtcttagaaataaagatccccaagaaattcttctgaatgaagcatttgttgtcccctatgggactaatttgtcagtaaactttggtccgaccgtggatggtgattttctcactgacatgccagacatattacttgaacttggacaatttaaaaaaacccagattttggtgggtgttaataaagatgaagggacagcttttttagcgtatggtgctcctggcttcagcaaagataacaatagtatcataactagaaaagaatttcaggaaggtttaaaaatattttttccaggagtgagtgagtttggaaaggaatccatcctttttcattacacagactgggtagatgatcagagacctgaaaactaccgtgaggccttgggtgatgttgttggggattataatttcatatgccctgccttggagttcaccaagaagttctcagaatggggaaataatgcctttttctactattttgaacaccgatcctccaaacttccgtggccagaatggatgggagtgatgcatggccaggaaattgaatttgtctttggtttacctctggaaagaagagataattacacaaaagccgaggaaattttgagtagatccatagtgaaacggtgggcaaattttgcaaaatatgggaatccaaatgagactcagaacaatagcacaagctggcctgtcttcaaaagcactgaacaaaaatatctaaccttgaatacagagtcaacaagaataatgacgaaactacgtgctcaacaatgtcgattctggacatcattttttccaaaagtcttggaaatgacaggaaatattgatgaagcagaatgggagtggaaagcaggattccatcgctggaacaattacatgatggactggaaaaatcaatttaacgattacactagcaagaaagaaagttgtgtgggtctc

SEQ ID NO: 188 - protein, 574 aa, Artificial Sequence
  synthetic butyrylcholinesterase variant
  VARIANT 227: Xaa = Ala
EDDIIIATKNGKVRGMNLTVFGGTVTAFLGIPYAQPPLGRLRFKKPQSLTKWSDIWNATKYANSCCQNIDQSFPGFFGSEMWNPNTDLSEDCLYLNVWIPAPKPKNATVLIWIYGGGFQTGTSSLHVYDGKFLARVERVIVVSMNYRVGALGFLALPGNPEAPGNMGLFDQQLALQWVQKNIAAFGGNPKSVTLFGESAGAASVSLHLLSPGSHSLFTRAILQSGSXNAPWAVTSLYEARNRTLNLAKLTGCSRENETEIIKCLRNKDPQEILLNEAFVVPYGTNLSVNFGPTVDGDFLTDMPDILLELGQFKKTQILVGVNKDEGTAFLAYGAPGFSKDNNSIITRKEFQEGLKIFFPGVSEFGKESILFHYTDWVDDQRPENYREALGDVVGDYNFICPALEFTKKFSEWGNNAFFYYFEHRSSKLPWPEWMGVMHGQEIEFVFGLPLERRDNYTKAEEILSRSIVKRWANFAKYGNPNETQNNSTSWPVFKSTEQKYLTLNTESTRIMTKLRAQQCRFWTSFFPKVLEMTGNIDEAEWEWKAGFHRWNNYMMDWKNQFNDYTSKKESCVGL

SEQ ID NO: 189 - DNA, 1722 bp, Artificial Sequence
  CDS (1)...(1722): synthetic butyrylcholinesterase variant
gaagatgacatcataattgcaacaaagaatggaaaagtcagagggatgaacttgacagtttttggtggcacggtaacagcctttcttggaattccctatgcacagccacctcttggtagacttcgattcaaaaagccacagtctctgaccaagtggtctgatatttggaatgccacaaaatatgcaaattcttgctgtcagaacatagatcaaagttttccaggcttccatggatcagagatgtggaacccaaacactgacctcagtgaagactgtttatatctaaatgtatggattccagcacctaaaccaaaaaatgccactgtattgatatggatttatggtggtggttttcaaactggaacatcatctttacatgtttatgatggcaagtttctggctcgggttgaaagagttattgtagtgtcaatgaactatagggtgggtgccctaggattcttagctttgccaggaaatcctgaggctccagggaacatgggtttatttgatcaacagttggctcttcagtgggttcaaaaaaatatagcagcctttggtggaaatcctaaaagtgtaactctctttggagaaagtgcaggagcagcttcagttagcctgcatttgctttctcctggaagccattcattgttcaccagagccattctgcaaagtggttcctttaatgctccttgggcggtaacatctctttatgaagctaggaacagaacgttgaacttagctaaattgactggttgctctagagagaatgagactgaaataatcaagtgtcttagaaataaagatccccaagaaattcttctgaatgaagtctttgttgtcccctatgggactccgttgtcagtaaactttggtccgaccgtggatggtgattttctcactgacatgccagacatattacttgaacttggacaatttaaaaaaacccagattttggtgggtgttaataaagatgaagggacagcttttttagtctatggtgctcctggcttcagcaaagataacaatagtatcataactagaaaagaatttcaggaaggtttaaaaatattttttccaggagtgagtgagtttggaaaggaatccatcctttttcattacacagactgggtagatgatcagagacctgaaaactaccgtgaggccttgggtgatgttgttggggattataatattatatgccctgccttggagttcaccaagaagttctcagaatggggaaataatgcctttttctactattttgaacaccgatcctccaaacttccgtggccagaatggatgggagtgatgcatggctatgaaattgaatttgtctttggtttacctctggaaagaagagataattacacaaaagccgaggaaattttgagtagatccatagtgaaacggtgggcaaattttgcaaaatatgggaatccaaatgagactcagaacaatagcacaagctggcctgtcttcaaaagcactgaacaaaaatatctaaccttgaatacagagtcaacaagaataatgacgaaactacgtgctcaacaatgtcgattctggacatcattttttccaaaagtcttggaaatgacaggaaatattgatgaagcagaatgggagtggaaagcaggattccatcgctggaacaattacatgatggactggaaaaatcaatttaacgattacactagcaagaaagaaagttgtgtgggtctc

SEQ ID NO: 190 - protein, 574 aa, Artificial Sequence
  synthetic butyrylcholinesterase variant
EDDIIIATKNGKVRGMNLTVFGGTVTAFLGIPYAQPPLGRLRFKKPQSLTKWSDIWNATKYANSCCQNIDQSFPGFHGSEMWNPNTDLSEDCLYLNVWIPAPKPKNATVLIWIYGGGFQTGTSSLHVYDGKFLARVERVIVVSMNYRVGALGFLALPGNPEAPGNMGLFDQQLALQWVQKNIAAFGGNPKSVTLFGESAGAASVSLHLLSPGSHSLFTRAILQSGSFNAPWAVTSLYEARNRTLNLAKLTGCSRENETEIIKCLRNKDPQEILLNEVFVVPYGTPLSVNFGPTVDGDFLTDMPDILLELGQFKKTQILVGVNKDEGTAFLVYGAPGFSKDNNSIITRKEFQEGLKIFFPGVSEFGKESILFHYTDWVDDQRPENYREALGDVVGDYNIICPALEFTKKFSEWGNNAFFYYFEHRSSKLPWPEWMGVMHGYEIEFVFGLPLERRDNYTKAEEILSRSIVKRWANFAKYGNPNETQNNSTSWPVFKSTEQKYLTLNTESTRIMTKLRAQQCRFWTSFFPKVLEMTGNIDEAEWEWKAGFHRWNNYMMDWKNQFNDYTSKKESCVGL

SEQ ID NO: 191 - DNA, 1722 bp, Artificial Sequence
  CDS (1)...(1722): synthetic butyrylcholinesterase variant
gaagatgacatcataattgcaacaaagaatggaaaagtcagagggatgaacttgacagtttttggtggcacggtaacagcctttcttggaattccctatgcacagccacctcttggtagacttcgattcaaaaagccacagtctctgaccaagtggtctgatatttggaatgccacaaaatatgcaaattcttgctgtcagaacatagatcaaagttttccaggcttccatggatcagagatgtggaacccaaacactgacctcagtgaagactgtttatatctaaatgtatggattccagcacctaaaccaaaaaatgccactgtattgatatggatttatggtggtggttttcaaactggaacatcatctttacatgtttatgatggcaagtttctggctcgggttgaaagagttattgtagtgtcaatgaactatagggtgggtgccctaggattcttagctttgccaggaaatcctgaggctccagggaacatgggtttatttgatcaacagttggctcttcagtgggttcaaaaaaatatagcagcctttggtggaaatcctaaaagtgtaactctctttggagaaagtgcaggagcagcttcagttagcctgcatttgctttctcctggaagccattcattgttcaccagagccattctgcaaagtggttccgckaatgctccttgggcggtaacatctctttatgaagctaggaacagaacgttgaacttagctaaattgactggttgctctagagagaatgagactgaaataatcaagtgtcttagaaataaagatccccaagaaattcttctgaatgaagcatttgttgtcccctatgggactcctgggtcagtaaactttggtccgaccgtggatggtgattttctcactgacatgccagacatattacttgaacttggacaatttaaaaaaacccagattttggtgggtgttaataaagatgaagggacagcttttttagtctcgggtgctcctggcttcagcaaagataacaatagtatcataactagaaaagaatttcaggaaggtttaaaaatattttttccaggagtgagtgagtttggaaaggaatccatcctttttcattacacagactgggtagatgatcagagacctgaaaactaccgtgaggccttgggtgatgttgttggggattataatttcatatgccctgccttggagttcaccaagaagttctcagaatggggaaataatgcctttttctactattttgaacaccgatcctccaaacttccgtggccagaatggatgggagtgatgcatggctatgaaattgaatttgtctttggtttacctctggaaagaagagataattacacaaaagccgaggaaattttgagtagatccatagtgaaacggtgggcaaattttgcaaaatatgggaatccaaatgagactcagaacaatagcacaagctggcctgtcttcaaaagcactgaacaaaaatatctaaccttgaatacagagtcaacaagaataatgacgaaactacgtgctcaacaatgtcgattctggacatcattttttccaaaagtcttggaaatgacaggaaatattgatgaagcagaatgggagtggaaagcaggattccatcgctggaacaattacatgatggactggaaaaatcaatttaacgattacactagcaagaaagaaagttgtgtgggtctc

SEQ ID NO: 192 - protein, 574 aa, Artificial Sequence
  synthetic butyrylcholinesterase variant
  VARIANT 227: Xaa = Ala
EDDIIIATKNGKVRGMNLTVFGGTVTAFLGIPYAQPPLGRLRFKKPQSLTKWSDIWNATKYANSCCQNIDQSFPGFHGSEMWNPNTDLSEDCLYLNVWIPAPKPKNATVLIWIYGGGFQTGTSSLHVYDGKFLARVERVIVVSMNYRVGALGFLALPGNPEAPGNMGLFDQQLALQWVQKNIAAFGGNPKSVTLFGESAGAASVSLHLLSPGSHSLFTRAILQSGSXNAPWAVTSLYEARNRTLNLAKLTGCSRENETEIIKCLRNKDPQEILLNEAFVVPYGTPGSVNFGPTVDGDFLTDMPDILLELGQFKKTQILVGVNKDEGTAFLVSGAPGFSKDNNSIITRKEFQEGLKIFFPGVSEFGKESILFHYTDWVDDQRPENYREALGDVVGDYNFICPALEFTKKFSEWGNNAFFYYFEHRSSKLPWPEWMGVMHGYEIEFVFGLPLERRDNYTKAEEILSRSIVKRWANFAKYGNPNETQNNSTSWPVFKSTEQKYLTLNTESTRIMTKLRAQQCRFWTSFFPKVLEMTGNIDEAEWEWKAGFHRWNNYMMDWKNQFNDYTSKKESCVGL

SEQ ID NO: 193 - DNA, 1722 bp, Artificial Sequence
  CDS (1)...(1722): synthetic butyrylcholinesterase variant
gaagatgacatcataattgcaacaaagaatggaaaagtcagagggatgaacttgacagtttttggtggcacggtaacagcctttcttggaattccctatgcacagccacctcttggtagacttcgattcaaaaagccacagtctctgaccaagtggtctgatatttggaatgccacaaaatatgcaaattcttgctgtcagaacatagatcaaagttttccaggcttccatggatcagagatgtggaacccaaacactgacctcagtgaagactgtttatatctaaatgtatggattccagcacctaaaccaaaaaatgccactgtattgatatggatttatggtggtggttttcaaactggaacatcatctttacatgtttatgatggcaagtttctggctcgggttgaaagagttattgtagtgtcaatgaactatagggtgggtgccctaggattcttagctttgccaggaaatcctgaggctccagggaacatgggtttatttgatcaacagttggctcttcagtgggttcaaaaaaatatagcagcctttggtggaaatcctaaaagtgtaactctctttggagaaagtgcaggagcagcttcagttagcctgcatttgctttctcctggaagccattcattgttcaccagagccattctgcaaagtggttccgckaatgctccttgggcggtaacatctctttatgaagctaggaacagaacgttgaacttagctaaattgactggttgctctagagagaatgagactgaaataatcaagtgtcttagaaataaagatccccaagaaattcttctgaatgaagcatttgttgtcccctatgggactcctttgtcagtaaactttggtccgaccgtggatggtgattttctcactgacatgccagacatattacttgaacttggacaatttaaaaaaacccagattttggtgggtgttaataaagatgaagggacagcttttttagtctatggtgctcctggcttcagcaaagataacaatagtatcataactagaaaagaatttcaggaaggtttaaaaatattttttccaggagtgagtgagtttggaaaggaatccatcctttttcattacacagactgggtagatgatcagagacctgaaaactaccgtgaggccttgggtgatgttgttggggattataatttcatatgccctgccttggagttcaccaagaagttctcagaatggggaaataatgcctttttctactattttgaacaccgatcctccaaacttctctggccagaatgggttggagtgatgcatggctatgaaattgaatttgtctttggtttacctctggaaagaagagataattacacaaaagccgaggaaattttgagtagatccatagtgaaacggtgggcaaattttgcaaaatatgggaatccaaatgagactcagaacaatagcacaagctggcctgtcttcaaaagcactgaacaaaaatatctaaccttgaatacagagtcaacaagaataatgacgaaactacgtgctcaacaatgtcgattctggacatcattttttccaaaagtcttggaaatgacaggaaatattgatgaagcagaatgggagtggaaagcaggattccatcgctggaacaattacatgatggactggaaaaatcaatttaacgattacactagcaagaaagaaagttgtgtgggtctc

SEQ ID NO: 194 - protein, 574 aa, Artificial Sequence
  synthetic butyrylcholinesterase variant
  VARIANT 227: Xaa = Ala
EDDIIIATKNGKVRGMNLTVFGGTVTAFLGIPYAQPPLGRLRFKKPQSLTKWSDIWNATKYANSCCQNIDQSFPGFHGSEMWNPNTDLSEDCLYLNVWIPAPKPKNATVLIWIYGGGFQTGTSSLHVYDGKFLARVERVIVVSMNYRVGALGFLALPGNPEAPGNMGLFDQQLALQWVQKNIAAFGGNPKSVTLFGESAGAASVSLHLLSPGSHSLFTRAILQSGSXNAPWAVTSLYEARNRTLNLAKLTGCSRENETEIIKCLRNKDPQEILLNEAFVVPYGTPLSVNFGPTVDGDFLTDMPDILLELGQFKKTQILVGVNKDEGTAFLVYGAPGFSKDNNSIITRKEFQEGLKIFFPGVSEFGKESILFHYTDWVDDQRPENYREALGDVVGDYNFICPALEFTKKFSEWGNNAFFYYFEHRSSKLLWPEWVGVMHGYEIEFVFGLPLERRDNYTKAEEILSRSIVKRWANFAKYGNPNETQNNSTSWPVFKSTEQKYLTLNTESTRIMTKLRAQQCRFWTSFFPKVLEMTGNIDEAEWEWKAGFHRWNNYMMDWKNQFNDYTSKKESCVGL

SEQ ID NO: 195 - DNA, 1722 bp, Artificial Sequence
  CDS (1)...(1722): synthetic butyrylcholinesterase variant
gaagatgacatcataattgcaacaaagaatggaaaagtcagagggatgaacttgacagtttttggtggcacggtaacagcctttcttggaattccctatgcacagccacctcttggtagacttcgattcaaaaagccacagtctctgaccaagtggtctgatatttggaatgccacaaaatatgcaaattcttgctgtcagaacatagatcaaagttttccaggcttccatggatcagagatgtggaacccaaacactgacctcagtgaagactgtttatatctaaatgtatggattccagcacctaaaccaaaaaatgccactgtattgatatggatttatggtggtggttttcaaactggaacatcatctttacatgtttatgatggcaagtttctggctcgggttgaaagagttattgtagtgtcaatgaactatagggtgggtgccctaggattcttagctttgccaggaaatcctgaggctccagggaacatgggtttatttgatcaacagttggctcttcagtgggttcaaaaaaatatagcagcctttggtggaaatcctaaaagtgtaactctctttggagaaagtgcaggagcagcttcagttagcctgcatttgctttctcctggaagccattcattgttcaccagagccattctgcaaagtggttccgckaatgctccttgggcggtaacatctctttatgaagctaggaacagaacgttgaacttagctaaattgactggttgctctagagagaatgagactgaaataatcaagtgtcttagaaataaagatccccaagaaattcttctgaatgaagcatttgttgtcccctatgggactaatttgtcagtaaactttggtccgaccgtggatggtgattttctcactgacatgccagacatattacttgaacttggacaatttaaaaaaacccagattttggtgggtgttaataaagatgaagggacagcttttttagcgtatggtgctcctggcttcagcaaagataacaatagtatcataactagaaaagaatttcaggaaggtttaaaaatattttttccaggagtgagtgagtttggaaaggaatccatcctttttcattacacagactgggtagatgatcagagacctgaaaactaccgtgaggccttgggtgatgttgttggggattataatttcatatgccctgccttggagttcaccaagaagttctcagaatggggaaataatgcctttttctactattttgaacaccgatcctccaaacttccgtggccagaatggatgggagtgatgcatggctatgaaattgaatttgtctttggtttacctctggaaagaagagataattacacaaaagccgaggaaattttgagtagatccatagtgaaacggtgggcaaattttgcaaaatatgggaatccaaatgagactcagaacaatagcacaagctggcctgtcttcaaaagcactgaacaaaaatatctaaccttgaatacagagtcaacaagaataatgacgaaactacgtgctcaacaatgtcgattctggacatcattttttccaaaagtcttggaaatgacaggaaatattgatgaagcagaatgggagtggaaagcaggattccatcgctggaacaattacatgatggactggaaaaatcaatttaacgattacactagcaagaaagaaagttgtgtgggtctc

SEQ ID NO: 196 - protein, 574 aa, Artificial Sequence
  synthetic butyrylcholinesterase variant
  VARIANT 227: Xaa = Ala
EDDIIIATKNGKVRGMNLTVFGGTVTAFLGIPYAQPPLGRLRFKKPQSLTKWSDIWNATKYANSCCQNIDQSFPGFHGSEMWNPNTDLSEDCLYLNVWIPAPKPKNATVLIWIYGGGFQTGTSSLHVYDGKFLARVERVIVVSMNYRVGALGFLALPGNPEAPGNMGLFDQQLALQWVQKNIAAFGGNPKSVTLFGESAGAASVSLHLLSPGSHSLFTRAILQSGSXNAPWAVTSLYEARNRTLNLAKLTGCSRENETEIIKCLRNKDPQEILLNEAFVVPYGTNLSVNFGPTVDGDFLTDMPDILLELGQFKKTQILVGVNKDEGTAFLAYGAPGFSKDNNSIITRKEFQEGLKIFFPGVSEFGKESILFHYTDWVDDQRPENYREALGDVVGDYNFICPALEFTKKFSEWGNNAFFYYFEHRSSKLPWPEWMGVMHGYEIEFVFGLPLERRDNYTKAEEILSRSIVKRWANFAKYGNPNETQNNSTSWPVFKSTEQKYLTLNTESTRIMTKLRAQQCRFWTSFFPKVLEMTGNIDEAEWEWKAGFHRWNNYMMDWKNQFNDYTSKKESCVGL

SEQ ID NO: 197 - DNA, 642 bp, Artificial Sequence
  synthetic butyrylcholinesterase variant
  CDS (1)...(642)
gaaattgtgttgacgcagtctccaggcaccctgtctttgtctccaggggaaagagccaccctctcctgcagggccagctcaagtgtaccgtacatccactggtaccagcagaaacctggccaggctcccaggctcctcatctatgccacatccgctctggcttctggcatcccagacaggttcagtggcagtgggtctgggacagacttcactctcaccatcagcagactggagcctgaagattttgcagtgtattactgtcagcagtggctgagtaacccacccacttttggccaggggaccaagctggagatcaaacgaactgtggctgcaccatctgtcttcatcttcccgccatctgatgagcagttgaaatctggaactgcctctgttgtgtgcctgctgaataacttctatcccagagaggccaaagtacagtggaaggtggataacgccctccaatcgggtaactcccaggagagtgtcacagagcaggacagcaaggacagcacctacagcctcagcagcaccctgacgctgagcaaagcagactacgagaaacacaaagtctacgcctgcgaagtcacccatcagggcctgagctcgcccgtcacaaagagcttcaacaggggagagtgttag

SEQ ID NO: 198 - protein, 213 aa, Artificial Sequence
  synthetic butyrylcholinesterase variant
EIVLTQSPGTLSLSPGERATLSCRASSSVPYIHWYQQKPGQAPRLLIYATSALASGIPDRFSGSGSGTDFTLTISRLEPEDFAVYYCQQWLSNPPTFGQGTKLEIKRTVAAPSVFIFPPSDEQLKSGTASVVCLLNNFYPREAKVQWKVDNALQSGNSQESVTEQDSKDSTYSLSSTLTLSKADYEKHKVYACEVTHQGLSSPVTKSFNRGEC

SEQ ID NO: 199-200 - skipped (2 entries)

SEQ ID NO: 201 - DNA, 2298 bp, Artificial Sequence
  synthetic butyrylcholinesterase variant
  CDS (1)...(2298)
gaggtgcagctggtgcagtctggagcagaggtgaaaaagcccggggagtctctgaagatctcctgtaagggttctggccgtacatttaccagttacaatatgcactgggtgcgccagatgcccgggaaaggcctggagtggatgggggctatttatcccttgacgggtgatacttcctacaatcagaagtcgaaactccaggtcaccatctcagccgacaagtccatcagcaccgcctacctgcagtggagcagcctgaaggcctcggacaccgccatgtattactgtgcgagatcgacttacgtgggcggtgactggcagttcgatgtctggggcaaggggaccacggtcaccgtctcctcagcctccaccaagggcccatcggtcttccccctggcaccctcctccaagagcacctctgggggcacagcggccctgggctgcctggtcaaggactacttccccgaaccggtgacggtgtcgtggaactcaggcgccctgaccagcggcgtgcacaccttcccggctgtcctacagtcctcaggactctactccctcagcagcgtggtgaccgtgccctccagcagcttgggcacccagacctacatctgcaacgtgaatcacaagcccagcaacaccaaggtggacaagaaagcagagcccaaatcttgtgacaaaactcacacatgcccaccgtgcccaaagcttgaagatgacatcataattgcaacaaagaatggaaaagtcagagggatgaacttgacagtttttggtggcacggtaacagcctttcttggaattccctatgcacagccacctcttggtagacttcgattcaaaaagccacagtctctgaccaagtggtctgatatttggaatgccacaaaatatgcaaattcttgctgtcagaacatagatcaaagttttccaggcttctttggatcagagatgtggaacccaaacactgacctcagtgaagactgtttatatctaaatgtatggattccagcacctaaaccaaaaaatgccactgtattgatatggatttatggtggtggttttcaaactggaacatcatctttacatgtttatgatggcaagtttctggctcgggttgaaagagttattgtagtgtcaatgaactatagggtgggtgccctaggattcttagctttgccaggaaatcctgaggctccagggaacatgggtttatttgatcaacagttggctcttcagtgggttcaaaaaaatatagcagcctttggtggaaatcctaaaagtgtaactctctttggagaaagtgcaggagcagcttcagttagcctgcatttgctttctcctggaagccattcattgttcaccagagccattctgcaaagtggttccgctaatgctccttgggcggtaacatctctttatgaagctaggaacagaacgttgaacttagctaaattgactggttgctctagagagaatgagactgaaataatcaagtgtcttagaaataaagatccccaagaaattcttctgaatgaagcatttgttgtcccctatgggactaatttgtcagtaaactttggtccgaccgtggatggtgattttctcactgacatgccagacatattacttgaacttggacaatttaaaaaaacccagattttggtgggtgttaataaagatgaagggacagcttttttagcgtatggtgctcctggcttcagcaaagataacaatagtatcataactagaaaagaatttcaggaaggtttaaaaatattttttccaggagtgagtgagtttggaaaggaatccatcctttttcattacacagactgggtagatgatcagagacctgaaaactaccgtgaggccttgggtgatgttgttggggattataatttcatatgccctgccttggagttcaccaagaagttctcagaatggggaaataatgcctttttctactattttgaacaccgatcctccaaacttccgtggccagaatggatgggagtgatgcatggctatgaaattgaatttgtctttggtttacctctggaaagaagagataattacacaaaagccgaggaaattttgagtagatccatagtgaaacggtgggcaaattttgcaaaatatgggaatccaaatgagactcagaacaatagcacaagctggcctgtcttcaaaagcactgaacaaaaatatctaaccttgaatacagagtcaacaagaataatgacgaaactacgtgctcaacaatgtcgattctggacatcattttttccaaaagtctga

SEQ ID NO: 202 - protein, 765 aa, Artificial Sequence [sequence omitted]

SEQ ID NO: 203 - skipped
  synthetic butyrylcholinesterase variant

SEQ ID NO: 204 - protein, 530 aa, Artificial Sequence
  synthetic butyrylcholinesterase variant
  VARIANT 227: Xaa = Ala
EDDIIIATKNGKVRGMNLTVFGGTVTAFLGIPYAQPPLGRLRFKKPQSLTKWSDIWNATKYANSCCQNIDQSFPGFFGSEMWNPNTDLSEDCLYLNVWIPAPKPKNATVLIWIYGGGFQTGTSSLHVYDGKFLARVERVIVVSMNYRVGALGFLALPGNPEAPGNMGLFDQQLALQWVQKNIAAFGGNPKSVTLFGESAGAASVSLHLLSPGSHSLFTRAILQSGSXNAPWAVTSLYEARNRTLNLAKLTGCSRENETEIIKCLRNKDPQEILLNEAFVVPYGTNLSVNFGPTVDGDFLTDMPDILLELGQFKKTQILVGVNKDEGTAFLAYGAPGFSKDNNSIITRKEFQEGLKIFFPGVSEFGKESILFHYTDWVDDQRPENYREALGDVVGDYNFICPALEFTKKFSEWGNNAFFYYFEHRSSKLPWPEWMGVMHGYEIEFVFGLPLERRDNYTKAEEILSRSIVKRWANFAKYGNPNETQNNSTSWPVFKSTEQKYLTLNTESTRIMTKLRAQQCRFWTSFFPKVL

1. A butyrylcholinesterase variant comprising the amino acid sequence selected from the group consisting of SEQ ID NOS: 4, 6, 8, 10, 12, 14, 24, 26, 28, 30, 32, 34, 36, 38, 40, 42, 44, 46, 48, 50, 52, 54, 56, 58, 60, 62, 64, 66, 68, 70, 72, 74, 76, 78, 80, 82, 84, 86, 88, 90, 92, 94, 96, 98, 100, 102, 104, 106, 108, 110, 112, 114, 116, 118, 120, 122, 124, 126, 128, 130, 132, 134, 136, 138, 140, 142, 144, 146, 148, 150, 152, 154, 156, 158, 160, 162, 164, 166, 168, 170, 172, 174, 176, 178, 180, 182, 184, 186, 188, 190, 192, 194, and 196, or functional fragment thereof.

2. The butyrylcholinesterase variant of claim 1, having at least a two-fold increase in camptothecin conversion activity compared to butyrylcholinesterase, or functional fragment thereof.

3. A butyrylcholinesterase variant comprising the amino acid sequence selected from the group consisting of SEQ ID NOS: 24, 26, 30, 32, 34, 36, 38, 104, 106, 108, 110, 112, 116, 118, 120, 122, 124, 126, 128, 132, 134, 136, 140, and 142, or functional fragment thereof.

4. The butyrylcholinesterase variant of claim 3, having at least a fifty-fold increase in camptothecin conversion activity compared to butyrylcholinesterase, or functional fragment thereof.

5. A butyrylcholinesterase variant comprising the amino acid sequence selected from the group consisting of SEQ ID NOS: 36, 108, 110, 112, 122, 124, 134, 178, 180, 182, 186, 188, 190, 192 and 196, or functional fragment thereof.

6. The butyrylcholinesterase variant of claim 5, having at least a one hundred-fold increase in camptothecin conversion activity compared to butyrylcholinesterase, or functional fragment thereof.

7. A butyrylcholinesterase variant comprising the amino acid sequence selected from the group consisting of SEQ ID NOS: 178, 180, 182, 184, 186, 188, 192 and 196, or functional fragment thereof.

8. The butyrylcholinesterase variant of claim 7, having at least a five hundred-fold increase in camptothecin conversion activity compared to butyrylcholinesterase, or functional fragment thereof.

9. A butyrylcholinesterase variant comprising the amino acid sequence selected from the group consisting of SEQ ID NOS: 178, 180, 182, 184, 188 and 192, or functional fragment thereof.

10. The butyrylcholinesterase variant of claim 9, having at least a six hundred-fold increase in camptothecin conversion activity compared to butyrylcholinesterase, or functional fragment thereof.

11. A butyrylcholinesterase variant comprising the amino acid sequence selected from the group consisting of SEQ ID NOS: 178, 180, 182, 184 and 188, or functional fragment thereof, or functional fragment thereof.

12. The butyrylcholinesterase variant of claim 11, having at least an eight hundred hundred-fold increase in camptothecin conversion activity compared to butyrylcholinesterase, or functional fragment thereof.

13. A butyrylcholinesterase variant comprising the amino acid sequence selected from the group consisting of SEQ ID NOS: 178, 180, 184 and 188, or functional fragment thereof.

14. The butyrylcholinesterase variant of claim 13, having at least a fifteen hundred-fold increase in camptothecin conversion activity compared to butyrylcholinesterase, or functional fragment thereof.

15. A butyrylcholinesterase variant comprising the amino acid sequence selected from the group consisting of SEQ ID NOS: 178, 180 and 188, or functional fragment thereof.

16. The butyrylcholinesterase variant of claim 15, having at least a two thousand-fold increase in camptothecin conversion activity compared to butyrylcholinesterase, or functional fragment thereof.

17. A butyrylcholinesterase variant comprising the amino acid sequence selected from the group consisting of SEQ ID NOS: 178 and 180, or functional fragment thereof.

18. The butyrylcholinesterase variant of claim 17, having at least a two thousand five hundred-fold increase in camptothecin conversion activity compared to butyrylcholinesterase, or functional fragment thereof.

19. A butyrylcholinesterase variant comprising the amino acid sequence designated SEQ ID NO: 180, or functional fragment thereof.

20. The butyrylcholinesterase variant of claim 19, having at least a three thousand-fold increase in camptothecin conversion activity compared to butyrylcholinesterase, or functional fragment thereof.

21. The butyrylcholinesterase variant of claim 1, 3, 5, 7, 9, 11, 13, 15, 17 or 19, or functional fragment thereof, further comprising an antibody or antibody fragment.

22. The butyrylcholinesterase variant of claim 21, wherein said antibody or antibody fragment specifically binds the epidermal growth factor receptor (EGFR).

23. The butyrylcholinesterase variant of claim 22, wherein said antibody or antibody fragment comprises an amino acid sequence as shown in SEQ ID NOS: 18 and 20.

24. The butyrylcholinesterase variant of claim 21, wherein said antibody or antibody fragment specifically binds the CD20 cell surface antigen.

25. The butyrylcholinesterase variant of claim 24, wherein said antibody or antibody fragment comprises an amino acid sequence as shown in SEQ ID NOS: 198 and 200.

26. The butyrylcholinesterase variant of claim 25, comprising the sequence shown in FIG. 19 and designated SEQ ID NO: 202.

27. The butyrylcholinesterase variant of claim 7, wherein said amino acid sequence comprises SEQ ID NO: 178.

28. The butyrylcholinesterase variant of claim 7, wherein said amino acid sequence comprises SEQ ID NO: 180.

29. The butyrylcholinesterase variant of claim 7, wherein said amino acid sequence comprises SEQ ID NO: 182.

30. The butyrylcholinesterase variant of claim 7, wherein said amino acid sequence comprises SEQ ID NO: 184.

31. The butyrylcholinesterase variant of claim 7, wherein said amino acid sequence comprises SEQ ID NO: 186.

32. The butyrylcholinesterase variant of claim 7, wherein said amino acid sequence comprises SEQ ID NO: 188.

33. The butyrylcholinesterase variant of claim 5, wherein said amino acid sequence comprises SEQ ID NO: 190.

34. The butyrylcholinesterase variant of claim 7, wherein said amino acid sequence comprises SEQ ID NO: 192.

35. The butyrylcholinesterase variant of claim 7, wherein said amino acid sequence comprises SEQ ID NO: 194.

36. The butyrylcholinesterase variant of claim 7, wherein said amino acid sequence comprises SEQ ID NO: 196.

37. A nucleic acid encoding a butyrylcholinesterase variant comprising the nucleic acid sequence selected from SEQ ID NOS: 3, 5, 7, 9, 11, 13, 23, 25, 27, 29, 31, 33, 35, 37, 39, 41, 43, 45, 47, 49, 51, 53, 55, 57, 59, 61, 63, 65, 67, 69, 71, 73, 75, 77, 79, 81, 83, 85, 87, 89, 91, 93, 95, 97, 99, 101, 103, 105, 107, 109, 111, 113, 115, 117, 119, 121, 123, 125, 127, 129, 131, 133, 135, 137, 139, 141, 143, 145, 147, 149, 151, 153, 155, 157, 159, 161, 163, 165, 167, 169, 171, 173, 175, 177, 179, 181, 183, 185, 187, 189, 191, 193, and 195, or fragment thereof.

38. The nucleic acid of claim 37, wherein said nucleic acid sequence comprises SEQ ID NO: 177, or a functional fragment thereof.

39. The nucleic acid of claim 37, wherein said nucleic acid sequence comprises SEQ ID NO: 179, or a functional fragment thereof.

40. The nucleic acid of claim 37, wherein said nucleic acid sequence comprises SEQ ID NO: 181, or a functional fragment thereof.

41. The nucleic acid of claim 37, wherein said nucleic acid sequence comprises SEQ ID NO: 183, or a functional fragment thereof.

42. The nucleic acid of claim 37, wherein said nucleic acid sequence comprises SEQ ID NO: 185, or a functional fragment thereof.

43. The nucleic acid of claim 37, wherein said nucleic acid sequence comprises SEQ ID NO: 187, or a functional fragment thereof.

44. The nucleic acid of claim 37, wherein said nucleic acid sequence comprises SEQ ID NO: 189, or a functional fragment thereof.

45. The nucleic acid of claim 37, wherein said nucleic acid sequence comprises SEQ ID NO: 191, or a functional fragment thereof.

46. The nucleic acid of claim 37, wherein said nucleic acid sequence comprises SEQ ID NO: 193, or a functional fragment thereof.

47. The nucleic acid of claim 37, wherein said nucleic acid sequence comprises SEQ ID NO: 195, or a functional fragment thereof.

48. A method of converting a camptothecin derivative to a topoisomerase inhibitor comprising contacting said camptothecin derivative with a butyrylcholinesterase variant comprising an amino acid sequence selected from SEQ ID NOS: 2, 4, 6, 8, 10, 12, 14, 24, 26, 28, 30, 32, 34, 36, 38, 40, 42, 44, 46, 48, 50, 52, 54, 56, 58, 60, 62, 64, 66, 68, 70, 72, 74, 76, 78, 80, 82, 84, 86, 88, 90, 92, 94, 96, 98, 100, 102, 104, 106, 108, 110, 112, 114, 116, 118, 120, 122, 124, 126, 128, 130, 132, 134, 136, 138, 140, 142, 144, 146, 148, 150, 152, 154, 156, 158, 160, 162, 164, 166, 168, 170, 172, 174, 176, 178, 180, 182, 184, 186, 188, 190, 192, 194 and 196, or functional fragment thereof, under conditions that allow conversion of a camptothecin derivative to a topoisomerase inhibitor.

49. The method of claim 48, wherein said butyrylcholinesterase variant exhibits a two-fold or greater increase in conversion capability compared to butyrylcholinesterase.

50. A method of converting a camptothecin derivative to a topoisomerase inhibitor comprising contacting said camptothecin derivative with a butyrylcholinesterase variant comprising an amino acid sequence selected from SEQ ID NOS: 24, 26, 30, 32, 34, 36, 38, 104, 106, 108, 110, 112, 116, 118, 120, 122, 124, 126, 128, 132, 134, 136, 140 and 142, or functional fragment thereof, under conditions that allow conversion of a camptothecin derivative to a topoisomerase inhibitor.

51. The method of claim 50, wherein said butyrylcholinesterase variant exhibits a fifty-fold or greater increase in conversion capability compared to butyrylcholinesterase.

52. A method of converting a camptothecin derivative to a topoisomerase inhibitor comprising contacting said camptothecin derivative with a butyrylcholinesterase variant comprising an amino acid sequence selected from the group consisting of SEQ ID NOS: 36, 108, 110, 112, 122, 124, 134, 178, 180, 182, 186, 188, 190, 192 and 196, or functional fragment thereof, under conditions that allow conversion of a camptothecin derivative to a topoisomerase inhibitor.

53. The method of claim 52, wherein said butyrylcholinesterase variant exhibits a one hundred-fold or greater increase in conversion capability compared to butyrylcholinesterase.

54. A method of converting a camptothecin derivative to a topoisomerase inhibitor comprising contacting said camptothecin derivative with a butyrylcholinesterase variant comprising an amino acid sequence selected from the group consisting of SEQ ID NOS: 178, 180, 182, 184, 186, 188, 192 and 196, or functional fragment thereof, under conditions that allow conversion of a camptothecin derivative to a topoisomerase inhibitor.

55. The method of claim 54, wherein said butyrylcholinesterase variant exhibits a five hundred-fold or greater increase in conversion capability compared to butyrylcholinesterase.

56. A method of converting a camptothecin derivative to a topoisomerase inhibitor comprising contacting said camptothecin derivative with a butyrylcholinesterase variant comprising an amino acid sequence selected from the group consisting of SEQ ID NO: 178, 180, 182, 184, 188 and 192, or functional fragment thereof, under conditions that allow conversion of a camptothecin derivative to a topoisomerase inhibitor.

57. The method of claim 56, wherein said butyrylcholinesterase variant exhibits a six hundred-fold or greater increase in conversion capability compared to butyrylcholinesterase.

58. A method of converting a camptothecin derivative to a topoisomerase inhibitor comprising contacting said camptothecin derivative with a butyrylcholinesterase variant comprising an amino acid sequence selected from the group consisting of SEQ ID NO: 178, 180, 182, 184 and 188, or functional fragment thereof, under conditions that allow conversion of a camptothecin derivative to a topoisomerase inhibitor.

59. The method of claim 58, wherein said butyrylcholinesterase variant exhibits a eight hundred-fold or greater increase in conversion capability compared to butyrylcholinesterase.

60. A method of converting a camptothecin derivative to a topoisomerase inhibitor comprising contacting said camptothecin derivative with a butyrylcholinesterase variant comprising an amino acid sequence selected from the group consisting of SEQ ID NO: 178, 180, 184 and 188, or functional fragment thereof, under conditions that allow conversion of a camptothecin derivative to a topoisomerase inhibitor.

61. The method of claim 60, wherein said butyrylcholinesterase variant exhibits a fifteen hundred-fold or greater increase in conversion capability compared to butyrylcholinesterase.

62. A method of converting a camptothecin derivative to a topoisomerase inhibitor comprising contacting said camptothecin derivative with a butyrylcholinesterase variant comprising an amino acid sequence selected from the group consisting of SEQ ID NO: 178, 180 and 188, or functional fragment thereof, under conditions that allow conversion of a camptothecin derivative to a topoisomerase inhibitor.

63. The method of claim 62, wherein said butyrylcholinesterase variant exhibits a two thousand-fold or greater increase in conversion capability compared to butyrylcholinesterase.

64. A method of converting a camptothecin derivative to a topoisomerase inhibitor comprising contacting said camptothecin derivative with a butyrylcholinesterase variant comprising an amino acid sequence selected from the group consisting of SEQ ID NO: 178 and 180, or functional fragment thereof, under conditions that allow conversion of a camptothecin derivative to a topoisomerase inhibitor.

65. The method of claim 64, wherein said butyrylcholinesterase variant exhibits a two thousand five hundred-fold or greater increase in conversion capability compared to butyrylcholinesterase.

66. A method of converting a camptothecin derivative to a topoisomerase inhibitor comprising contacting said camptothecin derivative with a butyrylcholinesterase variant comprising an amino acid sequence designated SEQ ID NO: 180, or functional fragment thereof, under conditions that allow conversion of a camptothecin derivative to a topoisomerase inhibitor.

67. The method of claim 66, wherein said butyrylcholinesterase variant exhibits a three thousand-fold or greater increase in conversion capability compared to butyrylcholinesterase.

68. The method of claim 48, 50, 52, 54, 56, 58, 60, 62, 64 or 66, wherein said topoisomerase inhibitor is SN-38.

69. The method of claim 68, wherein said camptothecin derivative is CPT-11.

70. The method of claim 54, wherein said butyrylcholinesterase variant comprises the amino acid sequence shown in SEQ ID NO: 178, or a functional fragment thereof.

71. The method of claim 54, wherein said butyrylcholinesterase variant comprises the amino acid sequence shown in SEQ ID NO: 180, or a functional fragment thereof.

72. The method of claim 54, wherein said butyrylcholinesterase variant comprises the amino acid sequence shown in SEQ ID NO: 182, or a functional fragment thereof.

73. The method of claim 54, wherein said butyrylcholinesterase variant comprises the amino acid sequence shown in SEQ ID NO: 184, or a functional fragment thereof.

74. The method of claim 54, wherein said butyrylcholinesterase variant comprises the amino acid sequence shown in SEQ ID NO: 186, or a functional fragment thereof.

75. The method of claim 54, wherein said butyrylcholinesterase variant comprises the amino acid sequence shown in SEQ ID NO: 188, or a functional fragment thereof.

76. The method of claim 52, wherein said butyrylcholinesterase variant comprises the amino acid sequence shown in SEQ ID NO: 190, or a functional fragment thereof.

77. The method of claim 54, wherein said butyrylcholinesterase variant comprises the amino acid sequence shown in SEQ ID NO: 192, or a functional fragment thereof.

78. The method of claim 54, wherein said butyrylcholinesterase variant comprises the amino acid sequence shown in SEQ ID NO: 194, or a functional fragment thereof.

79. The method of claim 54, wherein said butyrylcholinesterase variant comprises the amino acid sequence shown in SEQ ID NO: 196, or a functional fragment thereof.

80. A method of treating cancer comprising administering to an individual an effective amount of a butyrylcholinesterase variant selected from SEQ ID NOS: 2, 4, 6, 8, 10, 12, 14, 24, 26, 28, 30, 32, 34, 36, 38, 40, 42, 44, 46, 48, 50, 52, 54, 56, 58, 60, 62, 64, 66, 68, 70, 72, 74, 76, 78, 80, 82, 84, 86, 88, 90, 92, 94, 96, 98, 100, 102, 104, 106, 108, 110, 112, 114, 116, 118, 120, 122, 124, 126, 128, 130, 132, 134, 136, 138, 140, 142, 144, 146, 148, 150, 152, 154, 156, 158, 160, 162, 164, 166, 168, 170, 172, 174, 176, 178, 180, 182, 184, 186, 188, 190, 192, 194, and 196, or functional fragment thereof, exhibiting increased capability to convert a camptothecin derivative to a topoisomerase inhibitor compared to butyrylcholinesterase.

81. The method of claim 80, wherein said cancer is metastatic colorectal cancer.

82. The method of claim 80, wherein said cancer is ovarian cancer.

83. The method of claim 80, wherein said cancer is lung cancer.

84. The method of claim 80, wherein said cancer is non-Hodgkin's lymphoma.

85. The method of claim 80, wherein said topoisomerase inhibitor is SN-38.

86. The method of claim 80, wherein said camptothecin derivative is CPT-11.

87. The method of claim 80, wherein said butyrylcholinesterase variant comprises the amino acid sequence shown in SEQ ID NO: 178, or a functional fragment thereof.

88. The method of claim 80, wherein said butyrylcholinesterase variant comprises the amino acid sequence shown in SEQ ID NO: 180, or a functional fragment thereof.

89. The method of claim 80, wherein said butyrylcholinesterase variant comprises the amino acid sequence shown in SEQ ID NO: 182, or a functional fragment thereof.

90. The method of claim 80, wherein said butyrylcholinesterase variant comprises the amino acid sequence shown in SEQ ID NO: 184, or a functional fragment thereof.

91. The method of claim 80, wherein said butyrylcholinesterase variant comprises the amino acid sequence shown in SEQ ID NO: 186, or a functional fragment thereof.

92. The method of claim 80, wherein said butyrylcholinesterase variant comprises the amino acid sequence shown in SEQ ID NO: 188, or a functional fragment thereof.

93. The method of claim 80, wherein said butyrylcholinesterase variant comprises the amino acid sequence shown in SEQ ID NO: 190, or a functional fragment thereof.

94. The method of claim 80, wherein said butyrylcholinesterase variant comprises the amino acid sequence shown in SEQ ID NO: 192, or a functional fragment thereof.

95. The method of claim 80, wherein said butyrylcholinesterase variant comprises the amino acid sequence shown in SEQ ID NO: 194, or a functional fragment thereof.

96. The method of claim 80, wherein said butyrylcholinesterase variant comprises the amino acid sequence shown in SEQ ID NO: 196, or a functional fragment thereof.

97. The method of claim 80, wherein said butyrylcholinesterase variant further comprises an antibody or antibody fragment.

98. The method of claim 97, wherein said antibody or antibody fragment specifically binds the epidermal growth factor receptor (EGFR).

99. The method of claim 98, wherein said antibody or antibody fragment comprises an amino acid sequence as shown in SEQ ID NOS: 18 and 20.

100. The method of claim 97, wherein said antibody or antibody fragment specifically binds the CD20 cell surface antigen.

101. The method of claim 100, wherein said antibody or antibody fragment comprises an amino acid sequence as shown in SEQ ID NOS: 198 and 200.

102. The method of claim 97, wherein said butyrylcholinesterase comprises the sequence shown in FIG. 19 and designated SEQ ID NO: 202.

103. The method of claim 97, wherein said butyrylcholinesterase variant comprises the amino acid sequence designated as SEQ ID NO: 180, or functional fragment thereof.

104. The method of claim 103, wherein said functional fragment is a L530 truncation (SEQ ID NO.: 204).
